United States Patent Application Publication US 2026/0234224 A1, published August 13, 2026 (application 19/152,772).

The application's sequence listing, which the Patent Office published only in electronic form, follows.

SEQUENCE LISTING (2033 sequences)

SEQ ID NO: 1 - DNA, 16 bp, synthetic construct
  misc_feature 1..16: note = Description of sequence: Sequence Name: 71281-1
  source 1..16: mol_type = other DNA
gtcacaacatctacga

SEQ ID NO: 2 - DNA, 16 bp, synthetic construct
  misc_feature 1..16: note = Description of sequence: Sequence Name: 71281-2
  source 1..16: mol_type = other DNA
acggagacagcatgag

SEQ ID NO: 3 - DNA, 16 bp, synthetic construct
  misc_feature 1..16: note = Description of sequence: Sequence Name: 71281-3
  source 1..16: mol_type = other DNA
cccagttgtgcactta

SEQ ID NO: 4 - DNA, 16 bp, synthetic construct
  misc_feature 1..16: note = Description of sequence: Sequence Name: 71281-4
  source 1..16: mol_type = other DNA
aactggtagaggacgg

SEQ ID NO: 5 - DNA, 16 bp, synthetic construct
  misc_feature 1..16: note = Description of sequence: Sequence Name: 71281-5
  source 1..16: mol_type = other DNA
caagatctctcgagta

SEQ ID NO: 6 - DNA, 16 bp, synthetic construct
  misc_feature 1..16: note = Description of sequence: Sequence Name: 71281-6
  source 1..16: mol_type = other DNA
ttctacaagagaacag

SEQ ID NO: 7 - DNA, 16 bp, synthetic construct
  misc_feature 1..16: note = Description of sequence: Sequence Name: 71281-7
  source 1..16: mol_type = other DNA
agggagtagttaccca

SEQ ID NO: 8 - DNA, 16 bp, synthetic construct
  misc_feature 1..16: note = Description of sequence: Sequence Name: 71281-8
  source 1..16: mol_type = other DNA
gggaatggtctcttta

SEQ ID NO: 9 - DNA, 16 bp, synthetic construct
  misc_feature 1..16: note = Description of sequence: Sequence Name: 71281-9
  source 1..16: mol_type = other DNA
atctgccagatcgggt

SEQ ID NO: 10 - DNA, 16 bp, synthetic construct
  misc_feature 1..16: note = Description of sequence: Sequence Name: 71281-10
  source 1..16: mol_type = other DNA
ccatgtcaggcacatg

SEQ ID NO: 11 - DNA, 16 bp, synthetic construct
  misc_feature 1..16: note = Description of sequence: Sequence Name: 71281-11
  source 1..16: mol_type = other DNA
aggtccgagatgcgac

SEQ ID NO: 12 - DNA, 16 bp, synthetic construct
  misc_feature 1..16: note = Description of sequence: Sequence Name: 71281-12
  source 1..16: mol_type = other DNA
actatctaggaattac

SEQ ID NO: 13 - DNA, 16 bp, synthetic construct
  misc_feature 1..16: note = Description of sequence: Sequence Name: 71281-13
  source 1..16: mol_type = other DNA
gtgcagcgtgtatggg

SEQ ID NO: 14 - DNA, 16 bp, synthetic construct
  misc_feature 1..16: note = Description of sequence: Sequence Name: 71281-14
  source 1..16: mol_type = other DNA
ggtgttagtcgaacag

SEQ ID NO: 15 - DNA, 16 bp, synthetic construct
  misc_feature 1..16: note = Description of sequence: Sequence Name: 71281-15
  source 1..16: mol_type = other DNA
tctctaacaatacgct

SEQ ID NO: 16 - DNA, 16 bp, synthetic construct
  misc_feature 1..16: note = Description of sequence: Sequence Name: 71281-16
  source 1..16: mol_type = other DNA
actgctcagtccatac

SEQ ID NO: 17 - DNA, 16 bp, synthetic construct
  misc_feature 1..16: note = Description of sequence: Sequence Name: 71281-17
  source 1..16: mol_type = other DNA
agctctccagggcata

SEQ ID NO: 18 - DNA, 16 bp, synthetic construct
  misc_feature 1..16: note = Description of sequence: Sequence Name: 71281-18
  source 1..16: mol_type = other DNA
acttactagtgcgtga

SEQ ID NO: 19 - DNA, 16 bp, synthetic construct
  misc_feature 1..16: note = Description of sequence: Sequence Name: 71281-19
  source 1..16: mol_type = other DNA
gtaacgttcttgccgt

SEQ ID NO: 20 - DNA, 16 bp, synthetic construct
  misc_feature 1..16: note = Description of sequence: Sequence Name: 71281-20
  source 1..16: mol_type = other DNA
gtcaagtagcgttccg

SEQ ID NO: 21 - DNA, 16 bp, synthetic construct
  misc_feature 1..16: note = Description of sequence: Sequence Name: 71281-21
  source 1..16: mol_type = other DNA
catcagagttaccgat

SEQ ID NO: 22 - DNA, 16 bp, synthetic construct
  misc_feature 1..16: note = Description of sequence: Sequence Name: 71281-22
  source 1..16: mol_type = other DNA
gagtccgcatccttgc

SEQ ID NO: 23 - DNA, 16 bp, synthetic construct
  misc_feature 1..16: note = Description of sequence: Sequence Name: 71281-23
  source 1..16: mol_type = other DNA
tcattacagagttggc

SEQ ID NO: 24 - DNA, 16 bp, synthetic construct
  misc_feature 1..16: note = Description of sequence: Sequence Name: 71281-24
  source 1..16: mol_type = other DNA
atgggagtcctcctag

SEQ ID NO: 25 - DNA, 16 bp, synthetic construct
  misc_feature 1..16: note = Description of sequence: Sequence Name: 71281-25
  source 1..16: mol_type = other DNA
ctcattatcggcgcat

SEQ ID NO: 26 - DNA, 16 bp, synthetic construct
  misc_feature 1..16: note = Description of sequence: Sequence Name: 71281-26
  source 1..16: mol_type = other DNA
attactctcttagagc

SEQ ID NO: 27 - DNA, 16 bp, synthetic construct
  misc_feature 1..16: note = Description of sequence: Sequence Name: 71281-27
  source 1..16: mol_type = other DNA
attctactccaaccaa

SEQ ID NO: 28 - DNA, 16 bp, synthetic construct
  misc_feature 1..16: note = Description of sequence: Sequence Name: 71281-28
  source 1..16: mol_type = other DNA
ctgctgtgttccgtct

SEQ ID NO: 29 - DNA, 16 bp, synthetic construct
  misc_feature 1..16: note = Description of sequence: Sequence Name: 71281-29
  source 1..16: mol_type = other DNA
caagaaacaaacccat

SEQ ID NO: 30 - DNA, 16 bp, synthetic construct
  misc_feature 1..16: note = Description of sequence: Sequence Name: 71281-30
  source 1..16: mol_type = other DNA
tacggtagtaggcatg

SEQ ID NO: 31 - DNA, 16 bp, synthetic construct
  misc_feature 1..16: note = Description of sequence: Sequence Name: 71281-31
  source 1..16: mol_type = other DNA
cagccgacacaggttt

SEQ ID NO: 32 - DNA, 16 bp, synthetic construct
  misc_feature 1..16: note = Description of sequence: Sequence Name: 71281-32
  source 1..16: mol_type = other DNA
ggacaagcaaggttct

SEQ ID NO: 33 - DNA, 16 bp, synthetic construct
  misc_feature 1..16: note = Description of sequence: Sequence Name: 71281-33
  source 1..16: mol_type = other DNA
ggaacttgtcgcgtgt

SEQ ID NO: 34 - DNA, 16 bp, synthetic construct
  misc_feature 1..16: note = Description of sequence: Sequence Name: 71281-34
  source 1..16: mol_type = other DNA
tcggtaacaatggata

SEQ ID NO: 35 - DNA, 16 bp, synthetic construct
  misc_feature 1..16: note = Description of sequence: Sequence Name: 71281-35
  source 1..16: mol_type = other DNA
ctgaagtcagatcgga

SEQ ID NO: 36 - DNA, 16 bp, synthetic construct
  misc_feature 1..16: note = Description of sequence: Sequence Name: 71281-36
  source 1..16: mol_type = other DNA
taagagagtctgcggt

SEQ ID NO: 37 - DNA, 16 bp, synthetic construct
  misc_feature 1..16: note = Description of sequence: Sequence Name: 71281-37
  source 1..16: mol_type = other DNA
tattacccaagccatt

SEQ ID NO: 38 - DNA, 16 bp, synthetic construct
  misc_feature 1..16: note = Description of sequence: Sequence Name: 71281-38
  source 1..16: mol_type = other DNA
tgactagtcctctagc

SEQ ID NO: 39 - DNA, 16 bp, synthetic construct
  misc_feature 1..16: note = Description of sequence: Sequence Name: 71281-39
  source 1..16: mol_type = other DNA
tgtggtagttactgac

SEQ ID NO: 40 - DNA, 16 bp, synthetic construct
  misc_feature 1..16: note = Description of sequence: Sequence Name: 71282-1
  source 1..16: mol_type = other DNA
acactgaagtgaacgc

SEQ ID NO: 41 - DNA, 16 bp, synthetic construct
  misc_feature 1..16: note = Description of sequence: Sequence Name: 71282-2
  source 1..16: mol_type = other DNA
cagtaactctcgcatc

SEQ ID NO: 42 - DNA, 16 bp, synthetic construct
  misc_feature 1..16: note = Description of sequence: Sequence Name: 71282-3
  source 1..16: mol_type = other DNA
agggtgacactagtac

SEQ ID NO: 43 - DNA, 16 bp, synthetic construct
  misc_feature 1..16: note = Description of sequence: Sequence Name: 71282-4
  source 1..16: mol_type = other DNA
tctattggtgtcctct

SEQ ID NO: 44 - DNA, 16 bp, synthetic construct
  misc_feature 1..16: note = Description of sequence: Sequence Name: 71282-5
  source 1..16: mol_type = other DNA
acggagatctgtgcaa

SEQ ID NO: 45 - DNA, 16 bp, synthetic construct
  misc_feature 1..16: note = Description of sequence: Sequence Name: 71282-6
  source 1..16: mol_type = other DNA
acgtcaaagaagggta

SEQ ID NO: 46 - DNA, 16 bp, synthetic construct
  misc_feature 1..16: note = Description of sequence: Sequence Name: 71282-7
  source 1..16: mol_type = other DNA
agctcctcaggacgta

SEQ ID NO: 47 - DNA, 16 bp, synthetic construct
  misc_feature 1..16: note = Description of sequence: Sequence Name: 71282-8
  source 1..16: mol_type = other DNA
aggccgtgtcggatcc

SEQ ID NO: 48 - DNA, 16 bp, synthetic construct
  misc_feature 1..16: note = Description of sequence: Sequence Name: 71282-9
  source 1..16: mol_type = other DNA
acactgagtacgaccc

SEQ ID NO: 49 - DNA, 16 bp, synthetic construct
  misc_feature 1..16: note = Description of sequence: Sequence Name: 71282-10
  source 1..16: mol_type = other DNA
tcagatgcattggtac

SEQ ID NO: 50 - DNA, 16 bp, synthetic construct
  misc_feature 1..16: note = Description of sequence: Sequence Name: 71282-11
  source 1..16: mol_type = other DNA
cattatccaccgaatt

SEQ ID NO: 51 - DNA, 16 bp, synthetic construct
  misc_feature 1..16: note = Description of sequence: Sequence Name: 71282-12
  source 1..16: mol_type = other DNA
catcggggtacagacg

SEQ ID NO: 52 - DNA, 16 bp, synthetic construct
  misc_feature 1..16: note = Description of sequence: Sequence Name: 71282-13
  source 1..16: mol_type = other DNA
cagtaacaggtgcaac

SEQ ID NO: 53 - DNA, 16 bp, synthetic construct
  misc_feature 1..16: note = Description of sequence: Sequence Name: 71282-14
  source 1..16: mol_type = other DNA
cgtctacgtagcgatg

SEQ ID NO: 54 - DNA, 16 bp, synthetic construct
  misc_feature 1..16: note = Description of sequence: Sequence Name: 71282-15
  source 1..16: mol_type = other DNA
cgagcactcaagccta

SEQ ID NO: 55 - DNA, 16 bp, synthetic construct
  misc_feature 1..16: note = Description of sequence: Sequence Name: 71282-16
  source 1..16: mol_type = other DNA
ctgcctagttctgaac

SEQ ID NO: 56 - DNA, 16 bp, synthetic construct
  misc_feature 1..16: note = Description of sequence: Sequence Name: 71282-17
  source 1..16: mol_type = other DNA
gaggtgatctaactgg

SEQ ID NO: 57 - DNA, 16 bp, synthetic construct
  misc_feature 1..16: note = Description of sequence: Sequence Name: 71282-18
  source 1..16: mol_type = other DNA
ggcgactgttgaggtg

SEQ ID NO: 58 - DNA, 16 bp, synthetic construct
  misc_feature 1..16: note = Description of sequence: Sequence Name: 71282-19
  source 1..16: mol_type = other DNA
tgcaccttcaggccca

SEQ ID NO: 59 - DNA, 16 bp, synthetic construct
  misc_feature 1..16: note = Description of sequence: Sequence Name: 71282-20
  source 1..16: mol_type = other DNA
tgtgtttagatgcctt

SEQ ID NO: 60 - DNA, 700 bp, synthetic construct
  misc_feature 1..700: note = Description of sequence: Sequence Name: 71281-1
  source 1..700: mol_type = other DNA
agctctgagagaggagcccagccctgggattttcaggtgttttcatttggtgatcaggactgaacagagagaactcaccatggagtttgggctgagctggctttttcttgtggctattttaaaaggtgtccagtgtgaggtgcagctgttggagtctgggggaggcttggtacagcctggggggtccctgagactctcctgtgcagcctctgaattcacgtttagcacctatgccatgacctgggtccgccaggctccagggaaggggctggaatgggtctcagttattagtggtagtggcgggagcacatactacgcagactccgtgaagggccggttcaccatctccagagacaattccaacaacacgctgtatctgcaaatgaacagcctgagagtcgaggacacggccgtatattactgtgcgaaaaccatcccctattatgatgatttgactggtagaacgtacgactggttcgacccctggggccagggaaccctggtcaccgtctcctcagcctccaccaagggcccatcggtcttccccctggcaccctcctccaagagcacctctgggggcacagcggccctgggctgcctggtcaaggactacttccccgaaccggtgacggtgtcgtggaactcaggcgccctgaccagcggcgtgcacaccttcccggctgtcctacagtcctcagga

SEQ ID NO: 61 - DNA, 662 bp, synthetic construct
  misc_feature 1..662: note = Description of sequence: Sequence Name: 71281-2
  source 1..662: mol_type = other DNA
catccaacaaccacatcccttctccacagaagcctctgagaggaaagttcttcaccatggactggacctggagggtcttctgcttgctggctgtagctccaggtgctcgctcccaggtgcaggtggtgcagtctggggctgaagtgaggaagcctggggcctcagtgaagatctcctgtaagacatctggattcacatttaccagttatgttatgtattgggtgcgccaggcccctggacaagggcttgagtggatgggactgatcaacccgaatacactcatcacacgcaacgcacaaggatttgagggcagactcaccatgaccagggacacgtccacgagtacagtctacatggaactgaataggctgacatctgacgacacggccgtctattactgtgcgagaggaatgatgggggtcactggagccgactactttggcttctggggccggggagtccctgtcaccgtctcctccgcctccaccaagggcccatcggtcttccccctggcaccctcctccaagagcacctctgggggcacagcggccctgggctgcctggtcaaggactacttccccgaaccggtgacggtgtcgtggaactcaggcgccctgaccagcggcgtgcacaccttcccggctgtcctacagtcctcagga

SEQ ID NO: 62 - DNA, 676 bp, synthetic construct
  misc_feature 1..676: note = Description of sequence: Sequence Name: 71281-3
  source 1..676: mol_type = other DNA
aggtctcagagaggagccttagccctggactccaaggcctttccacttggtgatcagcactgagcacagaggactcaccatggagttggggctgagctgggttttccttgttgctattttagaaggtgtccagtgtgaggtgcagctggtggagtctgggggagacttggtccagcctggggggtccctgagactctcctgtgcagcctctggattaacctttagtatttattggatgagctgggtccgccaggctccagggaaggggctggagtgggtggccaacataaagcaagatggaggtgagaaatactatgtggactctgtgaagggccgattcaccatctccagagacaacgccaagaagttagtgtatctgcaaatgaacagcctgagagccgaggacacggccgtgtattattgtgtgagttgttctagcagcagctgggaatttgactactggggccagggaaccctggtcaccgtctcctcagcctccaccaagggcccatcggtcttccccctggcaccctcctccaagagcacctctgggggcacagcggccctgggctgcctggtcaaggactacttccccgaaccggtgacggtgtcgtggaactcaggcgccctgaccagcggcgtgcacaccttcccggctgtcctacagtcctcagga

SEQ ID NO: 63 - DNA, 762 bp, synthetic construct
  misc_feature 1..762: note = Description of sequence: Sequence Name: 71281-4
  source 1..762: mol_type = other DNA
aactggtagaggacggcccagaacccgtgcttatatggggagctctgggagaggagccccaggcccgggattcccaggtgtttccattcagtgatcaccactgaagacagaagactcatcatggagttctggctgagctgggttctccttgttgccattttaaaagatgtccagtgtgaggtgcagctggtggagtctgggggaggcttggtccagcctggggggtccctgagactctcctgttcagcctctggattcaccttcagtaactatgctatgaactgggtccgccaggctccagggaagggactggaatttgtttcaggtattaatcctattgtggataatgggggtagcacatactacgcagactcagtgaagggcagattcaccatctccagagacaattccaagaacacactgtatcttcaaatgagcagtctgagagctgaggacacggctgtatattactgtgtgaaaactaccggcgcttggggggacgtctttgactatgattcggggacttatctataccactttgactactggggccagggaaccctggtcaccgtctcctcagcctccaccaagggcccatcggtcttccccctggcgccctgctccaggagcacctccgagagcacagcggccctgggctgcctggtcaaggactacttccccgaaccggtgacggtgtcgtggaactcaggcgctctgaccagcggcgtgcacaccttcccggctgtcctacagtcctcagga

SEQ ID NO: 64 - DNA, 638 bp, synthetic construct
  misc_feature 1..638: note = Description of sequence: Sequence Name: 71281-5
  source 1..638: mol_type = other DNA
ggactgaacagagagaactcaccatggagtttgggctgagctggctttttcttgtggctattttaaaaggtgtccagtgtgaggtgcagctgttggagtctgggggaggcttggtacagcctggggggtccctgagactctcctgtgcagcctctggattcacctttaacaactatgccatgagctgggtccgccaggctccagggatggggctggagtgggtctcaggtgtcagtgctagtggtggtaccacatactacgcagactccgtgaagggccggttcaccatctccagagacaattccaagaacaccctgtttctgcaaatgaacagcctgagagccgacgacacggccgtatattattgtgcgaacctgataagtttggtggacgatttttggagtgattattatgacgactactggggccagggaaccctggtcaccgtctcttcagcctccaccaagggcccatcggtcttccccctggcaccctcctccaagagcacctctgggggcacagcggccctgggctgcctggtcaaggactacttccccgaaccggtgacggtgtcgtggaactcaggcgccctgaccagcggcgtgcacaccttcccggctgtcctacagtcctcagga

SEQ ID NO: 65 - DNA, 648 bp, synthetic construct
  misc_feature 1..648: note = Description of sequence: Sequence Name: 71281-6
  source 1..648: mol_type = other DNA
cgagcccagcactggaagtcgccggtgtttccattcggtgatcagcactgaacacagaggactcaccatggagtttgggctgagctgggttttcctcgttgctcttttaagaggtgtccactgtcaggtgcacctggtggagtctgggggaggcgtggtccagcctgggaggtccctgagactctcctgtgcagcctctggattcaccttcagtacttatggcatgcactgggtccgccaggctccaggcaaggggctggagtgggtggcacttatatcatttgatggaagtattaaatattacgcagagtccgtgaagggccgattcaccatctccagagacaattccaagaacacgctgtatgtacagatggacagcctgagaactgaggacacggctgtttattactgtgcgagaagtcctggtactgcctggggtggctacatggacgtctggggccaagggaccacggtcaccgtctcctcagcatccccgaccagccccaaggtcttcccgctgagcctctgcagcacccagccagatgggaacgtggtcatcgcctgcctggtccagggcttcttcccccaggagccactcagtgtgacctggagcgaaagcggacagggcgtgaccgccagaaacttccc

SEQ ID NO: 66 - DNA, 676 bp, synthetic construct
  misc_feature 1..676: note = Description of sequence: Sequence Name: 71281-7
  source 1..676: mol_type = other DNA
agctctgagagaggagcccagccctgggattttcaggtgttttcatttggtgatcaggactgaacagagagaactcaccatggagtttgggctgagctggctttttcttgtggctattttaaaaggtgtccagtgtgacctgcagctgttggagtctgggggaggcctggtccagcctggggggtccctgagactctcctgtgcagcctctggattcatctttagtcattatgacatgagttgggtccgccaggctccagggaaggggctggagtgggtctcgtctatgagtggtagtggtggtgctatatactacgctgcctccgtgaagggccgcttcatcatctccagagacaattccagggacactctgtatctgcagatgaccagcctgagagccgaggacacggccctctactactgtgcgaggcaaaagcagcagtatttctactttgactactggggccagggaaccctggtcaccgtctcctcagcctccaccaagggcccatcggtcttccccctggcaccctcctccaagagcacctctgggggcacagcggccctgggctgcctggtcaaggactacttccccgaaccggtgacggtgtcgtggaactcaggcgccctgaccagcggcgtgcacaccttcccggctgtcctacagtcctcagga

SEQ ID NO: 67 - DNA, 656 bp, synthetic construct
  misc_feature 1..656: note = Description of sequence: Sequence Name: 71281-8
  source 1..656: mol_type = other DNA
ttatttggggctttctgagagtcatggatctcatgtgcaagaaaatgaagcacctgtggttcttcctcctgctggtggcggctcccagatgggtcctgtcccagctgcagctgcaggagtcgggcccaggactggtgaagccttcggagaccctgtccctcacctgcactgtctctggtggctccatcagcagtagtagttactactggggctggatccgccagccccccgggaaggggctggaatggattggaaatatctattatagtgggagcacctactacaacccgtccctcagaagtcgagtcaccatatccgtagacacgttcaagagccacttctccctgaacctgaactccgtgaccgccgcagacacgtctatatattactgtgcgcgactgaaagttgggccagcgcctggtactcgggtttttgactactggggccagggaaccctggtctccgtctcctcagcctccaccaagggcccatcggtcttccccctggcaccctcctccaagagcacctctgggggcacagcggccctgggctgcctggtcaaggactacttccccgaaccggtgacggtgtcgtggaactcaggcgccctgaccagcggcgtgcacaccttcccggctgtcctacagtcctcagga

SEQ ID NO: 68 - DNA, 662 bp, synthetic construct
  misc_feature 1..662: note = Description of sequence: Sequence Name: 71281-9
  source 1..662: mol_type = other DNA
ggagtctccctcactgcccagctgggatctcagggcttcattttctgtcctccaccatcatggggtcaaccgccatcctcgccctcctcctggctgttctccaaggagtctgtgccgaggtgcagctggtgcagtctggagcagaggagaaaaagcccggggagtctctgaagatctcctgtaagggttctgaattcaactttgtcaactactgggtcgcctgggtgcgccagatgcccgggaaaggcctggagtggatggggatcatctttcctggtgactctggtaccagatacagcccgtccttccaaggccaggtcaccatctcagccgacaagtccatcagcaccgcctacctgcagtggagcagcctgaaggcctcggacaccgccatatattactgtgcgacaccctcatcagggcgtacgggggagggtatggacgtctggggccaagggaccacggtcaccgtctcctcagcctccaccaagggcccatcggtcttccccctggcaccctcctccaagagcacctctgggggcacagcggccctgggctgcctggtcaaggactacttccccgaaccggtgacggtgtcgtggaactcaggcgccctgaccagcggcgtgcacaccttcccggctgtcctacagtcctcagga

SEQ ID NO: 69 - DNA, 649 bp, synthetic construct
  misc_feature 1..649: note = Description of sequence: Sequence Name: 71281-10
  source 1..649: mol_type = other DNA
gccctggactccaaggcctttccacttggtgatcagcactgagcacagaggactcaccatggaattggggctgagctgggttttccttgttgctattttagaaggtgtccagtgtgaggtgcaggtggtggagtctgggggaggcttggtccagcctggggggtccctgagactctcctgtgcagcctctggattcatttttagtgactcttggatgggttgggtccgccaggctccagggaaggggctggagtgggtggccaacataaagagtgatggaagtacgaaatattatgtgggctctgtgaggggccgattcaccatctccagagacaacgcccagaactcagtgtatctgcaattgaactccctgagagccgaggacacggctacatattattgtgcgagacacggtgactacgcctttgactcctggggccagggaaccctggtcaccgtctcctcagcctccaccaagggcccatcggtcttccccctggcaccctcctccaagagcacctctgggggcacagcggccctgggctgcctggtcaaggactacttccccgaaccggtgacggtgtcgtggaactcaggcgccctgaccagcggcgtgcacaccttcccggctgtcctacagtcctcagga

SEQ ID NO: 70 - DNA, 658 bp, synthetic construct
  misc_feature 1..658: note = Description of sequence: Sequence Name: 71281-11
  source 1..658: mol_type = other DNA
atcgcataacaacaacattcctcctctaaagaagcccctgggagcacagctcatcaccatggactggacctggaggttcctctttgtggtggcagcagctacaggtgcccagtcccaggtgcagctggtgcagtctggggctgaggtgaagaagcctgggtcctcggtgaaggtctcctgcaaggcttctggcggcaccctcagcacctatactgtcagctgggtgcgacaggcccctgggcaaggtcttgagtggatggggggcatcatccctgtttttggtacatcagactacgcaaagaaattccagggcagagtctcgattaccgcggacgagcccacgaatacagcctacatggaactgaacagtctgcgatctgaagacacggccttttatttctgtgcgcggggacaaccgtatagcatctcgccttttgagtcctggggccagggaaccctggtcaccgtctcctcaacctccaccaagggcccatcggtcttccccctggcaccctcctccaagagcacctctgggggcacagcggccctgggctgcctggtcaaggactacttccccgaaccggtgacggtgtcgtggaactcaggcgccctgaccagcggcgtgcacaccttcccggctgtcctacagtcctcagga

SEQ ID NO: 71 - DNA, 664 bp, synthetic construct
  misc_feature 1..664: note = Description of sequence: Sequence Name: 71281-12
  source 1..664: mol_type = other DNA
tgggggctttctgagagtcatggatctcatgtgcaagaaaatgaagcacctgtggttcttcctcctgctggtggcggctcccagatgggtcctgtcccagctgcagctgcaggagtcgggcccaggactggtgaagccttcggagaccctgtccctcacctgctctgtctctggtgactccatcagcagtagtaattactactggggctggatccgccagcccccagggaaggggctggagtggattgggactatctattatagtgggaccacctactacaacccgtccctcaagagtcgagtcaccatatccgtagacacgtccaagaaccagttctccctgaacctgagctctgtgaccgccgcagacacggctgtctattactgtgcgagacacgattcggcagccctcgccggggactggagcagcggctggccctttgactactggggccagggaaccctggtcatcgtctcctcagcctccaccaagggcccatcggtcttccccctggcaccctcctccaagagcacctctgggggcacagcggccctgggctgcctggtcaaggactacttccccgaaccggtgacggtgtcgtggaactcaggcgccctgaccagcggcgtgcacaccttcccggctgtcctacagtcctcagga

SEQ ID NO: 72 - DNA, 655 bp, synthetic construct
  misc_feature 1..655: note = Description of sequence: Sequence Name: 71281-13
  source 1..655: mol_type = other DNA
tggggacccaaaaaccacacccctccttgggagactcccctagatcacagctcctcaccatggactggacctggagcatccttttcttggtggcagcagcaacaggcgcccactcccagaagcagttggtgcagtctggagctgaggtgaagaagcctggggcctcagtgaaggtctcctgcaaggcttctggttacagtttcaccagttatggcatcacctgggtgcgacaggcccctggacaagggcttgagtgggtgggatggatcagcggtcacaatggtaacacagactatgcacagaagttccaggacagagtcaccttgaccacagacacatccacgaacacagcctacttggaactgaggagcctgaaatctgacgacacggccgtgtattactgtgcgagagatcccagaatcgtggtcatggtagctgctaatcgacgaagaattgactactggggccagggaaccctggtcgccgtctcctcagcatccccgaccagccccaaggtcttcccgctgagcctctgcagcacccagccagatgggaacgtggtcatcgcctgcctggtccagggcttcttcccccaggagccactcagtgtgacctggagcgaaagcggacagggcgtgaccgccagaaacttccc

SEQ ID NO: 73 - DNA, 673 bp, synthetic construct
  misc_feature 1..673: note = Description of sequence: Sequence Name: 71281-14
  source 1..673: mol_type = other DNA
agctctgggagaagagccccagccccagaattcccaggagtttccatacggtgatcagcactgaacacagaggactcaccatggagtttgggctgagctgggttttccttgttgctattataaaaggtgtccagtgtcaggtgcagctggtggagtctgggggaggcttggtcaagcctggagggtccctgagactctcctgtgcagcctctggattcaccttcactgactactacatgacttggatgcgccaggctccagggaaggggctggagtgggtttcatacattagtagtagtggtgattacacaaactacgcagactctgtgaagggccgattcaccatctccagagacaacgccaggaactcactgtatctgcaaatgaacagcctgagagccgaggacacggctgtgtatttttgtgcgagagataccgttcccaattgtggtactaagtgctatcttacctttgactactggggccagggaaccctggtcaccgtctcctcagcatccccgaccagccccaaggtcttcccgctgagcctctgcagcacccagccagatgggaacgtggtcatcgcctgcctggtccagggcttcttcccccaggagccactcagtgtgacctggagcgaaagcggacagggcgtgaccgccagaaacttccc

SEQ ID NO: 74 - DNA, 704 bp, synthetic construct
  misc_feature 1..704: note = Description of sequence: Sequence Name: 71281-15
  source 1..704: mol_type = other DNA
agctctgggagaggagccccagccttgggattcccaagtgttttcattcagtgatcaggactgaacacagaggactcaccatggagtttgggctgagctggattttccttgctgccattttaaaaggtgtccagtgtgaagtgcagctggtggagtctgggggaggcttggtaaggcctggtgagtctcttagactctcctgtgtagcccctgattccactttcattaacgcctggatgaactgggtccgccaggctccagggcaggggctggagtgggtcggccggattagaagcaagcgcgacggtgggacgacagaccacgctgcacccgtgagaggcagattcagagtctcaagagatgattcaaaaaacacggtgtatctgcagatgaacagcctgaaagtcgaggacacaggcgtgtattactgtgcctcacatctcagtggttcggggacttatcacccaccccagtacggtttggacgtctggggcctagggaccacggtcaccgtctcctcagcctccaccaagggcccatcggtcttccccctggcaccctcctccaagagcacctctgggggcacagcggccctgggctgcctggtcaaggactacttccccgaaccggtgacggtgtcgtggaactcaggcgccctgaccagcggcgtgcacaccttcccggctgtcctacagtcctcagga

SEQ ID NO: 75 - DNA, 654 bp, synthetic construct
  misc_feature 1..654: note = Description of sequence: Sequence Name: 71281-16
  source 1..654: mol_type = other DNA
gggattcccagctgtctccactcggtgatcggcactgaatacaggagactcaccatggagtttgggctgagctgggttttccttgttgctattttaaaaggtgtccagtgtgaggtgcagctggtggagtctgggggaggcttggtccagcctggggggtccctgaaactctcctgtgcagcctctgggttcaccttcagtggctctgctatgcactgggtccgccaggcttccgggaaagggctggagtgggttggccgtattagaagcaaagctaacagttacgcgacagcatatgctgcgtcggtgaaaggcagattcaccatctccagagatgattcaaagaacacggcgtatctgcaaatgaacagcctgaaaaccgaggacacggccgtatattactgtactagaatccagaggacggaaggctttgactactggggccagggaaccctggtcaccgtctcctcagcttccaccaagggcccatcggtcttccccctggcgccctgctccaggagcacctctgggggcacagcggccctgggctgcctggtcaaggactacttccccgaaccggtgacggtgtcgtggaactcaggcgccctgaccagcggcgtgcacaccttcccggctgtcctacagtcctcagga

SEQ ID NO: 76 - DNA, 683 bp, synthetic construct
  misc_feature 1..683: note = Description of sequence: Sequence Name: 71281-17
  source 1..683: mol_type = other DNA
ggagccccagccctgggattcccagctgtttctgcttgctgatcaggactgcacacagagaactcaccatggagtttgggctgagctgggttttccttgttgctattttaaaaggtgtccagtgtgaggtgcagctggtggagtccgggggaggcttagttcagcctggggggtcccggagactctcctgtgcagcctctggattcaccttcagtgcctactggatgtactgggtccgccaagctccagggaaggggctggtgtgggtctcacgtattaatagtgatggcagtagcgcaagctacgcggactccgtgaagggccgattcaccatctccagagacaacgccaagaacactctttatttgcaaatgaacagtctgagagtcgaggacacggctgtctattactgtgcaagagatggtcttatctctgtttcggggagttattatggtctgccgggcgtctggggccaagggaccacggtcaccgtctcctcagcttccaccaagggcccatcggtcttccccctggcgccctgctccaggagcacctctgggggcacagcggccctgggctgcctggtcaaggactacttccccgaaccggtgacggtgtcgtggaactcaggcgccctgaccagcggcgtgcacaccttcccggctgtcctacagtcctcagga

SEQ ID NO: 77 - DNA, 639 bp, synthetic construct
  misc_feature 1..639: note = Description of sequence: Sequence Name: 71281-18
  source 1..639: mol_type = other DNA
agcactgggattccgaggtgtttcgacacggtgatcagcactgaacacagaggactcaccatggagttttggctgagctgggttttcctagttgccatttcaaaaggtgtccagtgtgaggtgcagttggtggagactggaggaggcttaatccagcctggggggtccctgagactctcctgtgtagtctctgggttcaccgtcggtagcaactacatgagctgggtccgccaggctccagggaagcgtctggagtgggtctcagttctttatgccggtggaagcacatactacgcggagtccgtcaagggccgattcaccgtctccagagacgagtccaggaacacactatttcttcaaatgcatagtctgagagtcgaggacacggccgtctattattgtgcgagaagagacgggtcgcactggggccagggaacgtcggtcaccgtctcctcaacctccaccaagggcccatcggtcttccccctggcaccctcctccaagagcacctctgggggcacagcggccctgggctgcctggtcaaggactacttccccgaaccggtgacggtgtcgtggaactcaggcgccctgaccagcggcgtgcacaccttcccggctgtcctacagtcctcagga

SEQ ID NO: 78 - DNA, 672 bp, synthetic construct
  misc_feature 1..672: note = Description of sequence: Sequence Name: 71281-19
  source 1..672: mol_type = other DNA
gggagcatcacccagcaaccacatctgtcctctagagaatcccctgagagctccgttcctcaccatggactggacctggaggatcctcttcttggtggcagcagccacaggagcccactcccaggtgcagctggtgcagtctggggctgaggtgaagaagcctggggcctcagtgaaggtctcctgcaaggcttctggatacaccttcaccggctactatatgcactgggtgcgacaggcccctggacaagggcttgagtggatgggatggatcaaccctaacagtggtggcacaaactatgcacagaagtttcagggcagggtcaccatgaccagggacacgtccatcagcacagcttacatggagttgagcaggctgagatctgacgacacggccgtgtattactgtgcgagagattgggacggggatgatagtagtgtttattatagggtctacaactactacggtatggacgtctggggccaagggtccacggtcaccgtctcctcagcatccccgaccagccccaaggtcttcccgctgagcctctgcagcacccagccagatgggaacgtggtcatcgcctgcctggtccagggcttcttcccccaggagccactcagtgtgacctggagcgaaagcggacagggcgtgaccgccagaaacttccc

SEQ ID NO: 79 - DNA, 674 bp, synthetic construct
  misc_feature 1..674: note = Description of sequence: Sequence Name: 71281-20
  source 1..674: mol_type = other DNA
ggagccccagccctgggattcccagctgtttctgcttgctgatcaggactgcacacagagaactcaccatggagtttgggctgagctgggttttccttgttgctattttaaaaggtgtccagtgtgcggtgcagctggtggagtccgggggaggcttagttcagcctggggggtccctgagactctcctgcgcagcctctggatttcccttcactacctactggatgcactgggtccgccaagccccagggaaggggccggtgtgggtctcaggtattaatcttgatggcagtgttacaacctatgcggactccgtgaagggccgattcaccatctccagagacaacgccaagaacatgctgtatctgcaaatgaacagtctgagagccgaggacacgggtgtgtattactgtgcaagacagtttcttcgcggagtggtgattaactggttcggcccctggggccagggaaccctggtcaccgtctcctcagcctccaccaagggcccatcggtcttccccctggcaccctcctccaagagcacctctgggggcacagcggccctgggctgcctggtcaaggactacttccccgaaccggtgacggtgtcgtggaactcaggcgccctgaccagcggcgtgcacaccttcccggctgtcctacagtcctcagga

SEQ ID NO: 80 - DNA, 663 bp, synthetic construct
  misc_feature 1..663: note = Description of sequence: Sequence Name: 71281-21
  source 1..663: mol_type = other DNA
tggggatgctttctgagagtcatggatctcatgtgcaagaaaatgaagcacctgtggttcttcctcctgctggtggcggctcccagatgggtcctgtcccagctgcagctgcaggagtcgggcccaggactggtgaagccttcggagaccctgtccctcacctgcactgtctctggtggttccatccgcagtagtgattactactggggctggatccgccagccccccgggaaggggctggagtggattgggactatctattatagtgggaccaggtactacaacccgtccccgtccctcaagggtcgaatcaccatatccgcagacacgtccaagaaccagttctccctgaagctgagctctgtgaccgccgcagacacggctgtctattactgtgcgagacagaggaaggcagctcgtcctatctactactactacatggacgtctggggcaaagggaccacggtcaccgtctcctcagcctccaccaagggcccatcggtcttccccctggcaccctcctccaagagcacctctgggggcacagcggccctgggctgcctggtcaaggactacttccccgaaccggtgacggtgtcgtggaactcaggcgccctgaccagcggcgtgcacaccttcccggctgtcctacagtcctcagga

SEQ ID NO: 81 - DNA, 678 bp, synthetic construct
  misc_feature 1..678: note = Description of sequence: Sequence Name: 71281-22
  source 1..678: mol_type = other DNA
atctggggagggtcctgctcacatgggaaatactttctgagagtcctggacctcctgtgcaagaacatgaaacacctgtggttcttcctcctgctggtggcagctcccagatgggtcctgtcccaggtgcagctgcaggagtcgggcccaggactggtgaagccttcacagaccctgtccctcacctgcactgtctctggtgactccatcagcagtggtggttactactggagctggatccgccagcacccagggaagggcctggagtggattgggtacatctattatggtgggaacacctactacaacccgtccctcaagagtcgcgccaccatatcagtagacacgtctaagaaccacttctccctgaagctgaggtctgtgactgccgcggacacggccgtatattactgtgcgagagccctcggtgacctgccttactactactacggtctggacgtctggggccaagggaccacggtcaccgtctcctcagcctccaccaagggcccatcggtcttccccctggcaccctcctccaagagcacctctgggggcacagcggccctgggctgcctggtcaaggactacttccccgaaccggtgacggtgtcgtggaactcaggcgccctgaccagcggcgtgcacaccttcccggctgtcctacagtcctcagga

SEQ ID NO: 82 - DNA, 641 bp, synthetic construct
  misc_feature 1..641: note = Description of sequence: Sequence Name: 71281-23
  source 1..641: mol_type = other DNA
actttctgagactcatgggcctcctgcacaagaacatgaaacacctgtggttctgcctcctcctggtggcggctcccagatgggtcttgtctcaggtgcagctgcaggagtcgggcccaggactggtgaagccttcggggaccctgtccctcacctgcgcagtctctggtgactccatcagtagtagtgactggtggaattgggtccgccagtccccagggaaggggctggagtggattggggaaatctatcatggtgggcacaccatctacaacccgtccctcaagagtcgagtcaccatgtcagtagacaagtccaacaaccaattctccctgaacctgacctctatgaccgccgcggacacggccatttattactgtgcgagagatcattccggcccaggcaacagctggtcctttgactactggggccagggaatcctggtcaccgtctcctcagcctccaccaagggcccatcggtcttccccctggcgccctgctccaggagcacctccgagagcacagcggccctgggctgcctggtcaaggactacttccccgaaccggtgacggtgtcgtggaactcaggcgctctgaccagcggcgtgcacaccttcccagctgtcctacagtcctcagga

SEQ ID NO: 83 - DNA, 654 bp, synthetic construct
  misc_feature 1..654: note = Description of sequence: Sequence Name: 71281-24
  source 1..654: mol_type = other DNA
agtctccttcaccacccagctgggatctcagggcttccttttctgtcctcctccaggatggggtcaaccgccatcctcgccctcctcctggctgttctccaaggagtctgtgccgaagtgcagctggtgcagtccggagcagaggtgaaaaagcccggggagtctctcaggatctcctgtaaggattctggatacagctttaccacctactggatcagctgggtgcgccagatgcccgggaaaggcctggagtggatggggaggattgatcctagtgactcttataccaactacagcccgtccttccaaggccacgtcaccatctcagctgacaagtccatcagcactgcctacctgcagtggagcagcctgaaggcctcggacaccgccatgtattactgtgcgagacatggggcgaaccccactgcttttgatatctggggccaagggacaatggtcaccgtctcttcagcctccaccaagggcccatcggtcttccccctggcaccctcctccaagagcacctctgggggcacagcggccctgggctgcctggtcaaggactacttccccgaaccggtgacggtgtcgtggaactcaggcgccctgaccagcggcgtgcacaccttcccggctgtcctacagtcctcagga

SEQ ID NO: 84 - DNA, 672 bp, synthetic construct
  misc_feature 1..672: note = Description of sequence: Sequence Name: 71281-25
  source 1..672: mol_type = other DNA
agctctgagagaggagcccagccctgggattttcaggtgttttcatttggtgatcaggactgaacagagagaactcaccatggagtttgggctgagctggctttttcttgtggctattttaaaaggtgtccagtgtgaggtgcagctgttggagtctgggggaggcttggtacagcctggggggtccctgagactctcctgtgcagcctctggattcacctttagcagctatgccatgagctgggtccgccaggccccagggaaggggctggagtgggtctcagttattagtggtagtggtggtaccacactctacgcagactccgtgaagggccggttcaccatctccagagacaattccaagaacacgctgtatctgcaaatgaaaagcctgagagccgaggacacggccgtatattactgtgcgaggactcgggatattgtattactgccaactgttgtggcgggcgactcggactggggccagggaaccctggtcaccgtctcctcagcatccccgaccagccccaaggtcttcccgctgagcctctgcagcacccagccagatgggaacgtggtcatcgcctgcctggtccagggcttcttcccccaggagccactcagtgtgacctggagcgaaagcggacagggcgtgaccgccagaaacttccc

SEQ ID NO: 85 - DNA, 660 bp, synthetic construct
  misc_feature 1..660: note = Description of sequence: Sequence Name: 71281-26
  source 1..660: mol_type = other DNA
agctctgagagaggagcccagccctgggattttcaggtgttttcatttggtgatcaggactgaacagagagaactcaccatggagtttgggctgagctggctttttcttgtggctattttaaaaggtgtccagtgtgaggtgcagttgctggagtctgggggaggcgtggtacagcctggggggtccctgagactctcctgtgcagcctctggattcgcctttagcaactatgccatgacctgggtccgccaggctccagggaaggggctggagtgggtcgcaactattagttatggtggtgataacacatactacgcagactccgtgaagggccggttcaccatctccagagacaattccatgaacacactatatctgcaaatgaacagcctgagagccgaggacacggccgtttattactgtgtgtctcccggtgacaacgttcctgactggtatttcgatctctggggccgtggcaccctggtcactgtctcctcagcatccccgaccagccccaaggtcttcccgctgagcctctgcagcacccagccagatgggaacgtggtcatcgcctgcctggtccagggcttcttcccccaggagccactcagtgtgacctggagcgaaagcggacagggcgtgaccgccagaaacttccc

SEQ ID NO: 86 - DNA, 671 bp, synthetic construct
  misc_feature 1..671: note = Description of sequence: Sequence Name: 71281-27
  source 1..671: mol_type = other DNA
attctactccaaccaatgccatcatgtttcttctctgggggctttctgagagtcatggatctcatgtgcaagaaaatgaagcacctgtggttcttcctcctgctggtggcggctcccagatgggtcctgtcccagctgcagttgcaggagtcgggcccaggactggtgaagccttcggagaccctgtccctcacatgcactgtttctggtggctccatcagcagtagtagttactactggggctggatccgccaggccccagggaaggggctagagtggattgggaatatctattatcgtgggagcacctactacaacccgtccctcaagagtcgagtcaccatatccgtagacacgtccaagagccagttttccctggagctgagctctgtgaccgccgcagacacggctgtatattactgtgcgagacgtggtctccttctgctggcagtggctggtagcggggcttttggtatctggggccaagggacaatggtcaccgtctcttcagcatccccgaccagccccaaggtcttcccgctgagcctctgcagcacccagccagatgggaacgtggtcatcgcctgcctggtccagggcttcttcccccaggagccactcagtgtgacctggagcgaaagcggacagggcgtgaccgccagaaacttccc

SEQ ID NO: 87 - DNA, 688 bp, synthetic construct
  misc_feature 1..688: note = Description of sequence: Sequence Name: 71281-28
  source 1..688: mol_type = other DNA
gggagcatcacccagcaaccacatctgtcctctagagaatcccctgagagctccgttcctcaccatggactggacctggaggatcgtcttcttggtggcagcagccacaggagcccactcccaggtgcaactagtgcagtctggggctgaagtgaagaagcctggggcctcagtgaaggtctcctgtcaggcttctggatacagttttaacgcctactatatgcactgggtgcgacaggcccctggacaagggcctgagtggatgggacggatcaaccctcacagtggtgacatacactatgcacaaaagtttcaggacagggtcaccatgaccagggacacgtccatcagcacagtttacatggaattgagtagattgagatctgacgacacggccgtgtattactgtgcgagagatgcgaaacgatttttggagtggtccgaaatctacttatactggtacatggacgtctggggcaaagggaccacggtcatcgtctcctcagcctccaccaagggcccatcggtcttccccctggcaccctcctccaagagcacctctgggggcacagcggccctgggctgcctggtcaaggactacttccccgaaccggtgacggtgtcgtggaactcaggcgccctgaccagcggcgtgcacaccttcccggctgtcctacagtcctcagga

SEQ ID NO: 88 - DNA, 669 bp, synthetic construct
  misc_feature 1..669: note = Description of sequence: Sequence Name: 71281-29
  source 1..669: mol_type = other DNA
agtctccttcaccacccagctgggatctcagggcttccttttctgtcctcctccaggatggggtcaaccgccatccttggcctcctcctggctgttctccaaggagtctgtgccgaagtgcagctggtgcagtctggagcagaggtgaaaaagcccggggagtctctgaggatctcctgtaagggttctggatacagctttaccagctactggatcagctggatgcgccagatgcccgggaaaggcctggagtggatggggaggattgatcctactgactcttataccaattacagcccgtccttccaaggccacgtcaccatctcagctgacaagtccatcagcactgcctacctgcagtggagtagcctgaaggcctcggacaccgccatgtactactgtgcgaaagactacggtgactacgacttgggctactactacgctatggacgtctggggccaagggaccacggtcaccgtctcctcagcctccaccaagggcccatcggtcttccccctggcaccctcctccaagagcacctctgggggcacagcggccctgggctgcctggtcaaggactacttccccgaaccggtgacggtgtcgtggaactcaggcgccctgaccagcggcgtgcacaccttcccggctgtcctacagtcctcagga

SEQ ID NO: 89 - DNA, 664 bp, synthetic construct
  misc_feature 1..664: note = Description of sequence: Sequence Name: 71281-30
  source 1..664: mol_type = other DNA
agctctgggagaagagccccagccccagaattcccaggagtttccattcggtgatcagcactgaacacagaggactcaccatggagtttgggctgaggtggattttccttgttgctattataaaaggtgtcgaatgtcaggtgcaggtggtggagtcggggggaggcttggtcaagcctggagggtccctgagactctcctgtgtagcctctggattcgctttcagtgacgattacatgagttgggtccgccaggctccggggaaggggctggagtggatttcatacattgatggtggtgatggcacttacaaaaattacgcagtctctgtgaagggccggttcaccatttctagagacaacgacaacaactcagtgcatctgcaattgaacggcctgagagtagacgacacggccgtgtattattgtgtgagaggccttggagtgggagctactggtcaccctcgctattggggccagggaaccctggtcaccgtctcctcagcatccccgaccagccccaaggtcttcccgctgagcctcgacagcaccccccaagatgggaacgtggtcgtcgcatgcctggtccagggcttcttcccccaggagccactcagtgtgacctggagcgaaagcggacagaacgtgaccgccagaaacttccc

SEQ ID NO: 90 - DNA, 682 bp, synthetic construct
  misc_feature 1..682: note = Description of sequence: Sequence Name: 71281-31
  source 1..682: mol_type = other DNA
gagctctgggagaggagcccagcactagaagtcggcggtgtttccattcggtgatcagcactgaacacagaggactcaccatggagtttgggctgagctgggttttcctcgttgctcttttaagaggtgtccagtgtcaggtgcagctggtggagtcggggggaggcgtggtccagcctgggaggtccctgagactctcctgtgcagcctctggattcaccttcagtcgctatggcatgcattgggtccgccaggctccaggcaaggggctggagtgggtggcatttatatcatatgatggtgataataaatactatgcagactccgtgaagggccgattcaccatctccagagacaattccaagaacacgctgtatctgcaaatggacagcctgagaactgaggacacggctgtgtattactgtgcgaaagacccgacagcccgacttgggtattgtagaggtggtagctgctacttggccgactactggggccagggaaccctggtcaccgtctcctcagcatccccgaccagccccaaggtcttcccgctgagcctctgcagcacccagccagatgggaacgtggtcatcgcctgcctggtccagggcttcttcccccaggagccactcagtgtgacctggagcgaaagcggacagggcgtgaccgccagaaacttccc

SEQ ID NO: 91 - DNA, 635 bp, synthetic construct
  misc_feature 1..635: note = Description of sequence: Sequence Name: 71281-32
  source 1..635: mol_type = other DNA
ggacaagcaaggttctgcttgatgggtttcttagctggggagtgactcctgtgccccaccatggacacactttgctccacgctcctgctgctgaccatcccttcatgggtcttgtcccagatcaccttgaaggagtctggtcctacgctggtgaaacccacacagaccctcacgctgacctgcaccttctctgggttctcactcagcactagtggagtgggtgtgggctggatccgtcagcccccaggaaaggccctggagtggcttgcagtcacttattgggatggtgatacgcgctacagtccatctctgaagagcaggctcaccatcaccaaggacacctccaaaaacctggtggtccttacaatgaccaacatggaccctgtggacacagccacatattactgtgtacaccatacaataactatgatagtaggctactggggccagggagccctggtcaccgtctcctcagcatccccgaccagccccaaggtcttcccgctgagcctctgcagcacccagccagatgggaacgtggtcatcgcctgcctggtccagggcttcttcccccaggagccactcagtgtgacctggagcgaaagcggacagggcgtgaccgccagaaacttccc

SEQ ID NO: 92 - DNA, 670 bp, synthetic construct
  misc_feature 1..670: note = Description of sequence: Sequence Name: 71281-33
  source 1..670: mol_type = other DNA
agctctgggagaggagcccagcactgggattccgaggtgtttccattcagtgatctgcactgaacacagaggactcgccatggagtttgggctgagctggattttccttgttgctattttaaaaggtgtccagtgtgacgtgcacctggtggagtctgggggaggcttggtccagcctggggggtccctgagactctcctgtgcagcctctgaaatcatcgtcagtgtcaactatatgaactgggtccgccaggctccagggaaggggctggagtgggtctcagttatttatagcggtggtagcactttctacgcagattccgtgaagggccgattcaccatctccagagacaattccaagaacacattgtatcttcaaatgaacagcctgagaattgaggacacggctgtgtattactgtgcgagaggtttcggtgaccactactttaactcctggggccagggaaccctggtcaccgtctcttcagcctccaccaagggcccatcggtcttccccctggcaccctcctccaagagcacctctgggggcacagcggccctgggctgcctggtcaaggactacttccccgaaccggtgacggtgtcgtggaactcaggcgccctgaccagcggcgtgcacaccttcccggctgtcctacagtcctcagga

SEQ ID NO: 93 - DNA, 676 bp, synthetic construct
  misc_feature 1..676: note = Description of sequence: Sequence Name: 71281-34
  source 1..676: mol_type = other DNA
cgagcccagcactggaagtcgccggtgtttccattcggtgatcatcactgaacacagaggactcaccatggagtttgggctgagctgggttttcctcgttgctcttttaagaggtggccagtgtcaggtgcaactggtggagtctgggggaggcgtggtccagcctggggcgtccctgagactctcctgtgcagcctctggtgggttcaatttcagttactctgctatgcactgggtccgccaggctccaggcaaggggctggagtgggtggcagtcatatcatatgatggaaccagtaagtaccagagagactccctgaaggaccgattgaccgtctccagagacaactccaggagcacagtgtttctggaaatgaacagcctgagagcagaggacacgggtgtgtattactgtgcgagagattactatgccaggagctgggacggctactttgaccactggggccagggaaccctggtcaccgtctcctcagcctccaccaagggcccatcggtcttccccctggcgccctgctccaggagcacctccgagagcacagcggccctgggctgcctggtcaaggactacttccccgaaccggtgacggtgtcgtggaactcaggcgctctgaccagcggcgtgcacaccttcccggctgtcctacagtcctcagga

SEQ ID NO: 94 - DNA, 664 bp, synthetic construct
  misc_feature 1..664: note = Description of sequence: Sequence Name: 71281-35
  source 1..664: mol_type = other DNA
gggagaggagcccagcactgggattccgaggtgtttccattcggtgatcagcactgaacacagaggactcaccatggagttttggctgacctgggttttccttgttgctattttaaaaggtgtccagtgtgaggtgcagctggtggagtctggaggaggcttgatccagcctggggggtccctgagactctcctgtgcagcctctgggttcaccgtcagtcgcaactacatgagctgggtccgccaggctccagggaaggggctggagtgggtctcacttatttatagcggtggtagcacatactacgcagactccgtgaagggccgattcaccatctccagagacaattccaagaacacgctgtatcttcaaatgatcagcctgagggccgaggacacggccgtatattactgtgcgagagagaccccaggctacggtgacgaagcctggggccagggaaccctggtcaccgtctcctcagcctccaccaagggcccatcggtcttccccctggcaccctcctccaagagcacctctgggggcacagcggccctgggctgcctggtcaaggactacttccccgaaccggtgacggtgtcgtggaactcaggcgccctgaccagcggcgtgcacaccttcccggctgtcctacagtcctcagga

SEQ ID NO: 95 - DNA, 638 bp, synthetic construct
  misc_feature 1..638: note = Description of sequence: Sequence Name: 71281-36
  source 1..638: mol_type = other DNA
agaaaccacatccctccgctagagaagcccctgacggcacagttcctcactatggactggatttggaggatcctcttcttggtgggagcagcgacaggtgcccactcccaaatgcagctggtgcagtctgggcctgaggtgaagaagcctgggacctcagtgaagatcccctgcagggcttctgggttcaccttttttacctcttctgtacagtgggtgcgacaggctcgtggacaacgccttgagtggataggatggatcgtcgttggcagtggtaagacaatctacgcacagagattccaggaaagagtcaccattaccagggacatgtccacaaacacagcctatatggagctgagcagcctgagatccgaggacacggccgtgtattactgtgcggcgccaaattgtactggtggttcctgctttgatggttttaatctctggggccaagggacacaggtcaccgtctcttcagcatccccgaccagccccaaggtcttcccgctgagcctctgcagcacccagccagatgggaacgtggtcatcgcctgcctggtccagggcttcttcccccaggagccactcagtgtgacctggagcgaaagcggacagggcgtgaccgccagaaacttccc

SEQ ID NO: 96 - DNA, 670 bp, synthetic construct
  misc_feature 1..670: note = Description of sequence: Sequence Name: 71281-37
  source 1..670: mol_type = other DNA
gggagaggagcccagcactgggattccgaggtgtttccattcggtgatcagcactgaacacagaggactcaccatggagttctggctgagctgggttttccttgtttctattttaaaaggtgtccagtgtgaggtgccgctggtggaatctggaggaggcttgatccagcctggggggtccctgagactctcctgtgcagcctctgggttcaccgtcagtagtaactacatgtattgggtccgccaggctccagggaaggggctggagtgggtctcactgatttatcccggtggaactacatactatgcagactccgtgaagggccgattcaccatctccagagacaattccaagaacacgctgtggcttcaaatgaacagcctgagagccgaggacacggccgtctatttctgtgcgagaggcccttattgtcgtggtgctggctgccgtccctggggccagggaaccctggtcaccgtctcctcagcctccaccaagggcccatcggtcttccccctggcaccctcctccaagagcacctctgggggcacagcggccctgggctgcctggtcaaggactacttccccgaaccggtgacggtgtcgtggaactcaggcgccctgaccagcggcgtgcacaccttcccggctgtcctacagtcctcagga

SEQ ID NO: 97 - DNA, 685 bp, synthetic construct
  misc_feature 1..685: note = Description of sequence: Sequence Name: 71281-38
  source 1..685: mol_type = other DNA
acaaccacacccctcctaagaagaagcccctagaccacagctccacaccatggactggacctggaggatcctcttcttggtggcagcagcaacaggtgcccactcccaggtgcaactggtgcaatctgggtctgagttgaagaagcctggggcctcagtgaaggtttcctgcaaggcttcgggatacaccttcactaggtatgctgtgaattgggtgcgacaggcccctggacaaggacttgagtggatgggatggatcaacacgaacactggaaacccaacctatgcccaggacttcacaggacggtttgtcttctccttggatacctctgtcaacacggcatatctgcagatcagcagcctaaaggctgaagacactgccgtgtattactgtgcgagcgtcccacacccacattgtagtagtaccagctgctatgccggcgactactactacttcggtgtggacgtctggggccaagggaccacggtcaccgtctcctcagcttccaccaagggcccatcggtcttccccctggcgccctgctccaggagcacctctgggggcacagcggccctgggctgcctggtcaaggactacttccccgaaccggtgacggtgtcgtggaactcaggcgccctgaccagcggcgtgcacaccttcccggctgtcctacagtcctcagga

SEQ ID NO: 98 - DNA, 661 bp, synthetic construct
  misc_feature 1..661: note = Description of sequence: Sequence Name: 71281-39
  source 1..661: mol_type = other DNA
cgagcccagcactggaagtcgccggtgtttccattcggtgatcatcactgaacacagaggactcaccatggagtttgggctgagctgggttttcctcgttgctcttttaagaggtgtccagtgtcaggtgcagctggtggagtctgggggaggcgtggtccagcctggggggtccctgagactctcctgtgcagcctctggattcaccttcagtacctatgctatccactgggtccgccaggctccaggcaaggggctggagtgggtggcagcgatatcatatgatggatacaataaacagtacgcagactccgtgaagggccgtttcaccatctccagagacaattccaacaacacgctgtatctgcaaatgttcagcctgagaactgaagacacggctgtatattactgtgcgagagatactaccccctacggtatggacgtctggggccaagggaccacggtcaccgtctcctcagcctccaccaagggcccatcggtcttccccctggcgccctgctccaggagcacctccgagagcacagcggccctgggctgcctggtcaaggactacttccccgaaccggtgacggtgtcgtggaactcaggcgctctgaccagcggcgtgcacaccttcccggctgtcctacagtcctcagga

SEQ ID NO: 99 - DNA, 669 bp, synthetic construct
  misc_feature 1..669: note = Description of sequence: Sequence Name: 71282-1
  source 1..669: mol_type = other DNA
agctctgagagaggagcccagccctgggattttcaggtgttttcatttggtgatcaggactgaacagagagaactcaccatggagtttgggctgagctggctttttcttgtggctattttaaaaggtgtccagtgtgaggtgcagctgttggagtctgggggaggcttggtacagcctggggggtccctgagactctcctgtgcagcctctggattcacctttagcagctatgccatgagctgggtccgccaggctccaggaaaggggctggggtgggtctcagctataagtggtggtggtggtagtacatactacgcagactccgtgaagggccggttcaccatctccagagacaattccaagaacacgctctatctgcaaatgaacagcctgagagccgaggacacggccgtatattactgtgcgaaatattactatgatattagtgcttattacatccccaactttgactactggggccagggaaccctggtcaccgtctcctcagcatccccgaccagccccaaggtcttcccgctgagcctctgcagcacccagccagatgggaacgtggtcatcgcctgcctggtccagggcttcttcccccaggagccactcagtgtgacctggagcgaaagcggacagggcgtgaccgccagaaacttccc

SEQ ID NO: 100 - DNA, 660 bp, synthetic construct
  misc_feature 1..660: note = Description of sequence: Sequence Name: 71282-2
  source 1..660: mol_type = other DNA
agctctgagagaggagcccagccctgggattttcaggtgttttcatttggtgatcaggactgaacagagagaactcaccatggagtttgggctgagctggctttttcttgtggctattttaaaaggtgtccagtgtgaggtgcagctgttggagtctgggggaggcttggtacagcctggggggtccctgagactctcctgtgtagcctctggattcacctttagcagctatcccatgagctgggtccgccaggctccagggaaggggctggagtgggtctcaggtatcactgctaccacatactacgcagactccgtgaagggccgattcaccatctccagagacaattccagggacacgctgtatctgcagatgaacagcctcagagccgaggacacggccgtgtattactgtgcgaagcatcttaagccttgtagtgacagctgctatgccacccttgactactggggccagggaaccctggtcaccgtctcctcagcatccccgaccagccccaaggtcttcccgctgagcctctgcagcacccagccagatgggaacgtggtcatcgcctgcctggtccagggcttcttcccccaggagccactcagtgtgacctggagcgaaagcggacagggcgtgaccgccagaaacttccc

SEQ ID NO: 101 - DNA, 666 bp, synthetic construct
  misc_feature 1..666: note = Description of sequence: Sequence Name: 71282-3
  source 1..666: mol_type = other DNA
atttggggatgctttctgagagtcatggatctcatgtgcaagaaaatgaagcacctgtggttcttcctcctgctggtggcggctcccagatgggtcctgtcccagttgcagctgcaggagtcgggcccaggattggtgaagtcctcggagaccctgtccctcacctgctctgtctctggtggctccatcagaactactagttattactgggcctgggtccgccagcccccagggaagggcctggagtggattggcagtatgtactatactgggcgcacctcctacgctgagagcacctactacaacccgtccctcgggaatcgagtcaccatctccgtagacacgtcgaagcagttctccctgaaactgagctcagtgaccgccgcagacacggctgtgttttactgtgctagacattcacgcagtagaggtggctacacttacgactattggggccagggaaccctggtcaccgtctcctcagcctccaccaagggcccatcggtcttccccctggcaccctcctccaagagcacctctgggggcacagcggccctgggctgcctggtcaaggactacttccccgaaccggtgacggtgtcgtggaactcaggcgccctgaccagcggcgtgcacaccttcccggctgtcctacagtcctcagga

SEQ ID NO: 102 - DNA, 642 bp, synthetic construct
  misc_feature 1..642: note = Description of sequence: Sequence Name: 71282-4
  source 1..642: mol_type = other DNA
atcacataacaaccagattcctcctctaaagaagcccctgggagcacagctcatcaccatggactggacctggaggttcctctttgtggtggcagcagctacaggtgtccagtcccaggtccagctggtgcagtctggggctgaggtgaagaagcctggatcctcggtgaaggtctcctgcaaggcttctggaggcaccttcagcacctctgctatcagctgggtgcgacaggcccctggacaagggcttgagtggatgggagggatcatccctttctttggtacaccaaactacgcacagaagtttcagggcagagtcacgattaccgcggacgagtccacgagcacagtctacatggacctgagcagcctgagatctgaggacacggccgtgtattactgtgcgaatgactataccagcagtggctggtacactccccttgactactggggccagggaaccctggtcaccgtctcctcagcatccccgaccagccccaaggtcttcccgctgagcctcgacagcaccccccaagatgggaacgtggtcgtcgcatgcctggtccagggcttcttcccccaggagccactcagtgtgacctggagcgaaagcggacagaacgtgaccgccagaaacttccc

SEQ ID NO: 103 - DNA, 666 bp, synthetic construct
  misc_feature 1..666: note = Description of sequence: Sequence Name: 71282-5
  source 1..666: mol_type = other DNA
agctctgagagaggagcccagccctgggattttcaggtgttttcatttggtgatcaggactgaacagagagaactcaccatggagtttgggctgaactggctttttcttgtggctattttaaaaggtgtccactgtgaggtgcaggtgttggagtctgggggaggcttggtacagcctggggggtccctgaggctctcctgtgcagcctctggattcacctttagcagctatgccatgacctgggtccgccaggctccagggaagggactggagtgggtctcaactattagtggtgatggtgctagcacattctacgcagactccgtgaggggccggttcaccctctccagagacaattccaagaacaccctgtatctgcaaatgaacagcctgagagccgaggacacagccgtgtattactgtgcgaaagatctggaggactacggtgacttcgcggcatgttttgactcctggggccagggacgcctggtcaccgtctcctcagcatccccgaccagccccaaggtcttcccgctgagcctcgacagcaccccccaagatgggaacgtggtcgtcgcatgcctggtccagggcttcttcccccaggagccactcagtgtgacctggagcgaaagcggacagaacgtgaccgccagaaacttccc

SEQ ID NO: 104 - DNA, 697 bp, synthetic construct
  misc_feature 1..697: note = Description of sequence: Sequence Name: 71282-6
  source 1..697: mol_type = other DNA
agctctcagagaggtgccttagccctggattccaaggcatttccacttggtgatcagcactgaacacagaggactcaccatggagttggggctgtgctgggttttccttgttgctattttagaaggtgtccagtgtgaggtgcagctggtggagtcggggggaggcttggtacagcctggggggtccctgagactctcctgtgcagcctccggattcaccttcagtagttatagtatgaagtgggtccgccaggctccagggaaggggctggagtggatttcagacatcagtagtagtagcagcaccatatactacgcagactctgtgaagggccgattcaccatcttcagagacaacgccaagaattcactctatctgcaaatgaacagcctgagagccgaggacacggctgtgtactactgtgcgagagatggggattattatgatagtagtggtcactctcgagaagcttttgatatctggggccaagggacaatggtcaccgtctcttcagcctccaccaagggcccatcggtcttccccctggcaccctcctccaagagcacctctgggggcacagcggccctgggctgcctggtcaaggactacttccccgaaccggtgacggtgtcgtggaactcaggcgccctgaccagcggcgtgcacaccttcccggctgtcctacagtcctcagga

SEQ ID NO: 105 - DNA, 648 bp, synthetic construct
  misc_feature 1..648: note = Description of sequence: Sequence Name: 71282-7
  source 1..648: mol_type = other DNA
cgagcccagcactggaagtcgccggtgtttccattcggtgatcatcactgaacacagaggactcaccatggagtttgggctgagctgggttttcctcgttgctcttttaagaggtgtccagtgtcaggtgcagctggtggagtctgggggaggcgtggtccagcctgggaggtccctgagactctcctgtgcagcctctggattcaccttcagaagtcatagtatccactgggtccgccaggctccaggcaaggggctggagtgggtggctgttatatcatatgatggatacaataaatactacgcagactccgtgaagggccgattcaccatgtccagagacaattcccagaacacgttgtatctgcagatgaacagcctgagagttgaggacacggctgtgtattactgtgcgagagcgggcggggggacctactacagttggttcgacccctggggccagggaaccctggtcaccgtctcctcagcctccaccaagggcccatcggtcttccccctggcaccctcctccaagagcacctctgggggcacagcggccctgggctgcctggtcaaggactacttccccgaaccggtgacggtgtcgtggaactcaggcgccctgaccagcggcgtgcacaccttccc

SEQ ID NO: 106 - DNA, 694 bp, synthetic construct
  misc_feature 1..694: note = Description of sequence: Sequence Name: 71282-8
  source 1..694: mol_type = other DNA
gggtctcagagaggagccttagccctggactccaaggcctttccacttggtgatcagcactgagcacagaggactcaccatggagttggggctgagctgggttttccttgttgctattttagaaggtgtccagtgtgaggtgcagctggtggagtctgggggaggcttggtccagcctggggggtccctgagactctcctgtgcagcctctggattcagccttagtagctattggatgagctgggtccgccaggctccagggaaggggctggagtgggtggccaacataaaccgagatggaagtgagaaatactctgtggactctgtgaagggccgattcaccatctccagagacaacaccaaaaattcactgtatctgcacatgaacagcctgagagtcgaggacacggccgtgtattactgtgcgcgagaccctaccagccactggttggtcggggagcccccctactttgactactggggccagggaaccctggtcatcgtctcctcagcctccaccacgcgcccaacggtcttccccctggcaccctcctccaagagcacctctgggggcacagcggccctgggctgcctggtcaaggactacttccccgaaccggtgacggtgtcgtggaactcaggcgccctgaccagcggcgtgcacaccttcccggctgtcctacagtcctcagga

SEQ ID NO: 107 - DNA, 657 bp, synthetic construct
  misc_feature 1..657: note = Description of sequence: Sequence Name: 71282-9
  source 1..657: mol_type = other DNA
agctctgagagaggagccttagccctggattccaaggcctatccacttggtgatcagcactgagcaccgaggattcaccatggaactggggctccgctgggttttccttgttgctattttagaaggtgtccagtgtgaggtgcagctggtggagtctgggggaggtctggtcaagccgggggggtccctgagactctcctgtgcagcctctggattcacgttcagcagctataacatgcactgggtccgccaggctccagggaagggcctggagtgggtctcattcattagtactagtagtgattacatatactacgcagactcagtgaagggccgattcaccatctccagagacaacgccaagaactctctgtatctgcaaatgaacagcctgagagccgaggacacggctgtgtattactgtgcgagagatgtgataggggagtgggagccacatgcctactggggccagggaaccctcgtcaccgtctcgtcagcatccccgaccagccccaaggtcttcccgctgagcctctgcagcacccagccagatgggaacgtggtcatcgcctgcctggtccagggcttcttcccccaggagccactcagtgtgacctggagcgaaagcggacagggcgtgaccgccagaaacttccc

SEQ ID NO: 108 - DNA, 648 bp, synthetic construct
  misc_feature 1..648: note = Description of sequence: Sequence Name: 71282-10
  source 1..648: mol_type = other DNA
cgagcccagcactggaagtcgccggtgtttccattcggtgatcagcactgaacacagaggactcaccatggagtttgggctgagctgggttttcctcgttgctcttttaagaggtgtccagtgtcaggtgcagctggtggagtctgggggaggcgtggtccagcctgggaggtccctgagactctcctgtgtagcctctggattcaccttctatacctatgctatgcactgggtccgccaggctccaggcaaggggctggagtgggtggcacttatctcatatgatggaattaataaatactacacagactccgtgaggggccgattcaccatctccagagacaattccaagaacacgctgtatctccaaatgaacggcctgagaggtgatgacacggctgtttattactgtgcgagagcgtatggtgggagctacagcggggcttttgatatctggggccaagggacaatcgtcaccgtctcttcagcatccccgaccagccccaaggtcttcccgctgagcctctgcagcacccagccagatgggaacgtggtcatcgcctgcctggtccagggcttcttcccccaggagccactcagtgtgacctggagcgaaagcggacagggcgtgaccgccagaaacttccc

SEQ ID NO: 109 - DNA, 674 bp, synthetic construct
  misc_feature 1..674: note = Description of sequence: Sequence Name: 71282-11
  source 1..674: mol_type = other DNA
gggagaggagcccagcactgggattccgaggtgtttccattcggtgatcagcactgaacacagaggactcaccatggagttttggctgagctgggttttccttgttgctattttaaaaggtgtccagtgtgaggtgcagctggtggagtctggaggaggcttggtccagcctggggggtccctgagactctcctgtgcagcctctgggttcaccgtcagtagcaactacatgagctgggtccgccaggctccagggaaggggctggagtgggtctcagttatttatagcggtggtagcacatactacgcagactccgtgaagggccgattcaccatctccagacacaattccaagaacacgctgtatcttcaaatgaacagcctgagagctgaggacacggccgtgtattactgtgcgagagatagggggggccggtcgtttttagacggtatggacgtctggggccaagggaccacggtcaccgtctcctcagcctccaccaagggcccatcggtcttccccctggcaccctcctccaagagcacctctgggggcacagcggccctgggctgcctggtcaaggactacgtccccgacccggtgacggtgtcgtggaactcaggcgccctgaccagcggcgtgcacaccttcccggcggtcctacagtcctcag

SEQ ID NO: 110 - DNA, 660 bp, synthetic construct
  misc_feature 1..660: note = Description of sequence: Sequence Name: 71282-12
  source 1..660: mol_type = other DNA
atcacataacaaccacattcctcctctaaagaagcccctgggagcacagctcatcaccatggactggacctggaggttcctctttgtggtggcagcagctacaggtgtccagtcccaggtgcagctggtgcagtctggggctgaggtgaagaagcctgggtcctcggtgaaggtctcctgcagggcttctggaggcaccttcagcagctatgctatcagctgggtgcgacaggcccctggacaagggcttgagtggatgggagggatcatccctatctttggtacagcaaactacgcacagaaattccagggcagagtcacgattaccgcggacgaatccacgagcacagcctacatggaggtgagcagcctgagatctgaggacacggccgtgtattactgtgcgagaacggtgactcccatccgatattgtactagtaccagctgctttacgcgccttcactactggggccagggaaccctggtcaccgtctcctcagcatccccgaccagccccaaggtcttcccgctgagcctctgcagcacccagccagatgggaacgtggtcatcgcctgcctggtccagggcttcttcccccaggagccactcagtgtgacctggagcgaaagcggacagggcgtgaccgccagaaacttccc

SEQ ID NO: 111 - DNA, 663 bp, synthetic construct
  misc_feature 1..663: note = Description of sequence: Sequence Name: 71282-13
  source 1..663: mol_type = other DNA
agctctgagagaggagcccagcactgggattccgaggtgtttccattcagtgatctgcactgaacacagaggactcgccatggagtttgggctgagctggattttccttgttggtattttaaaaggtgtccagtgtgaggtgcagttggtggagtcggggggaggcttggtccaccctggggggtccctgagactctcctgtgcagcctctggattcaccgtcagttccaactacatgaactgggtccgccaggctccagggaaggggctggagtgggtctcagttatttataccggtggtagcacatactacgcaggctccgtgaagggcagattcaccatctccagagacaattccgagaacacgctgtatcttcaaatgaatggtctgagagccgaggacacggctgtatattactgtgcgagagatccgttagtgggaactactcgacttcatgcttttgatatctggggccaagggacgatggtcaccgtcgctccagcatccccgaccagccccaaggtcttcccgctgagcctctgcagcacccagccagatgggaacgtggtcatcgcctgcctggtccagggcttcttcccccaggagccactcagtgtgacctggagcgaaagcggacagggcgtgaccgccagaaacttccc

SEQ ID NO: 112 - DNA, 583 bp, synthetic construct
  misc_feature 1..583: note = Description of sequence: Sequence Name: 71282-14
  source 1..583: mol_type = other DNA
gagctctgggagaggagcccagcactagaagtcggcggtgtttccattcggtgatcagcactgaacacagaggactcaccatggagtttgggctgagctgggttttcctcgttgctcttttaagaggtgtccagtgtcaggtgcagctggtggagtctgggggaggcgtggtccagcctgggaggtccctaagactctcctgtgcagcctctggattcaccttcagaagctatggcatgcactgggtccgccaggctccaggcaaggggctggagtgggtggcagttatatcatatgatggaagtaataaatactatgcagactccgtgaagggccgattcaccatctccagagacaattccaagaacacgctgtatctgcagatgaacagcctgagagctgaggacacggctgtgtattactgtgcggcagtcgtggatattgtagtagtacccagtattatattgctgccgcctgactactggggccagggatccctggtcaccgtcgcctcagcctccaccccggtcccctcggtcgtcccccgggcacccgcctccaagagcacctctggggccacagc

SEQ ID NO: 113 - DNA, 675 bp, synthetic construct
  misc_feature 1..675: note = Description of sequence: Sequence Name: 71282-15
  source 1..675: mol_type = other DNA
agctctgagagaggagcccagccctgagattttcaggtgttttcatttggtgatcaggactgaacagagagaactcaccatggagtttgggctgagatggctttttcttgtggctattttaaaaggtgtccagtgtgaggtgcagctgttggagtctgggggaggcttggttcagcctggggggtccctgagactctcctgtgtagcctctggattcaccttcagcaactatgccatgagctgggtccgccaggctccagggaaggggctggagtgggtctcaatgattactggtactggatataacacatattatgcagactccgtgaagggccggttcaccgtctcgagagacaattccaaaaacacagtgtttctgcagatgaaccgcctgagagccgaggacgcggccgtgtattactgtgcgaaagatgcgggagggaggttcggggagctgttaagggatcactactttgactcctggggccagggaacccgggtcaccgtctccccagcatccccgaccagccccaaggtcttcccgctgagcctcgacagcaccccccaagatgggaacgtggtcgtcgcatgcctggtccagggcttcttcccccaggagccactcagtgtgacctggagcgaaagcggacagaacgtgaccgccagaaacttccc

SEQ ID NO: 114 - DNA, 620 bp, synthetic construct
  misc_feature 1..620: note = Description of sequence: Sequence Name: 71282-16
  source 1..620: mol_type = other DNA
ccacatccctcctcagaagcccccagaggacaaccccttaccatggactggacctggaggatcctctttttggtggcagcagccacaggtgtccactcccaagtccagcttgtgcagtctggggctgaggtgaagaagactggggcctcactgaaggtttcctgcaaggcttctggatacagcataacgagccaaggcatgcactgggtgcgccaggcccccggacaaaggctggagtggatgggacggatcagccgtgacaatgacaacacagtaaaatcacggaaactgcaagacagactcagcattaccaaggacacatccgcgaacacagtctacatggagttgagcagcctgacatcggaagacacggctgtctattactgtgccagagattcgtggaagccgcaagggggcattgacttctggggcccggggaccctggtcaccgtctcctcagcatccccgaccagccccaaggtcttcccgctgagcctctgcagcacccagccagatgggaacgtggtcatcgcctgcctggtccagggcttcttcccccaggagccactcagtgtgacctggagcgaaagcggacagggcgtgaccgccagaaacttccc

SEQ ID NO: 115 - DNA, 546 bp, synthetic construct
  misc_feature 1..546: note = Description of sequence: Sequence Name: 71282-17
  source 1..546: mol_type = other DNA
agcatcatccaacaaccacatcccttctcaacagaagcctccgagaggaaagttcttcaccatggactggacctggagggtcttctgcttgctggctgtagctccaggtggtcactcccaggtgaagctggtacaatctggggctgaggtgaagaggcctggggcctcagttaaggtttcctgcaccgcatctggatacaccttcaccgactacttcatgcactgggtgcggcaggcccccggacgagggcttgagtggatgggcgtagttcagtgtggtggtaatttcatcgggtacgcacagaagtttcagggcagagtcaccatgaccagggacacgaccacgaatacactctacatggagatgaacagcctgacatctgaggacacggccgtctattattgcgcgagagaagtagtgactggagtgggcgctaaggcctactggggccagggaaccctggtcaccgtctcctcagcctccaccaagggcccatcggtcttccccctggcaccctcctccaagagcacctctgggggcacagc

SEQ ID NO: 116 - DNA, 655 bp, synthetic construct
  misc_feature 1..655: note = Description of sequence: Sequence Name: 71282-18
  source 1..655: mol_type = other DNA
acatgggaaatactttctgagagcccgggacctcctgtgcaagaacatgaaacatctgtggttcttccttctcctggtggcagctcccagatgggtcctgtcccaggtgcagctgcaggagtcgggcccaggactggtgaagccttcggagaccctgtccctcacctgcactgtctctggtgactccatgagtcgttactactggagctggatccggcagcccccagggaagggactggagtggattgggtatatctattacagtgggagcaccaactacaacccctccctcaagagtcgagtcaccatatcagtagacacgtccaagaaccagttctccctgaagctgagctctgtgaccgccgcagacacggccgtgtattattgtgcgaggacgtattactatgataggagtggtccgactcatgcttttgatatctggggccaagggacaatggtcaccgtctcttcagcctccaccaagggcccatcggtcttccccctggcgccctgctccaggagcacctctgggggcacagcggccctgggctgcctggtcaaggactacttccccgaaccggtgacggtgtcgtggaactcaggcgccctgaccagcggcgtgcacaccttcccggctgtcctacagtcctcagga

SEQ ID NO: 117 - DNA, 712 bp, synthetic construct
  misc_feature 1..712: note = Description of sequence: Sequence Name: 71282-19
  source 1..712: mol_type = other DNA
aggtctcagagaggagccttagccctggactccaaggcctttccacttggtgatcagcactgagcacagaggactcaccatggagttggggctgagctgggttttccttgttgctattttagaaggtgtccagtgtgatgtgcatctggtggagtctgggggaggcttggtcccgccgggggggtccctgagactctcctgtacaccctctggattcacttttagtaactattggatgacctgggtccgccaggctccagggaaggggctggagtgggtggccaatataaagcaagatagaagtgagaagtattatgtggactctgtgaggggccgattcaccatctccagagacaacgccaagaattcattgtatttgcaaatgaacagcctgagagccgaggacacggccgtgtatttctgtgcgcgaggggtcgcaatggtggatactgttctcacgattactccagcgcggggaaactggcacttcgatctctggggccgtggcaccttggtcactgtcgtgccagcctccaccaagggcccatcggtcttccccctggcgccctgctccaggagcacctccgagagcacagcggccctgggctgcctggtcaaggactacttccccgaaccggtgacggtgtcgtggaactcaggcgctctgaccagcggcgtgcacaccttcccagctgtcctacagtcctcagga

SEQ ID NO: 118 - DNA, 633 bp, synthetic construct
  misc_feature 1..633: note = Description of sequence: Sequence Name: 71282-20
  source 1..633: mol_type = other DNA
tggggagtgactcctgtgccccaccatggacacactttgctccacgctcctgctgctgaccatcccttcatgggtcttgtcccagatcaccttgaaggagtctggtcctacactggtgaaacccacacagaccctcacgctgacctgcaccttctctgggttctcactcaacactagtggagtgggtgtgggctggatccgtcagcccccaggaaaggccctggagtggcttgcactcatttattggaatgatgatgagcgctacagcccatctctgaagagcaggctcaccatcaccaaggacacctccaaaaaccaggtggtccttacaatgaccaacatggaccctgtggacacagccacttactactgtggacacagacggcaatttcactataatagcattggttcttactacgaagaatactactttgactactggggccagggaaccctggtcaccgtctcctcagcatccccgaccagccccaaggtcttcccgctgagcctctgcagcacccagccagatgggaacgtggtcatcgcctgcctggtccagggcttcttcccccaggagccactcagtgtgacctggagcgaaagcggacagggcgtgaccgccagaaacttccc

SEQ ID NO: 119 - DNA, 382 bp, synthetic construct
  misc_feature 1..382: note = Description of sequence: Sequence Name: 71281-1
  source 1..382: mol_type = other DNA
gaggtgcagctgttggagtctgggggaggcttggtacagcctggggggtccctgagactctcctgtgcagcctctgaattcacgtttagcacctatgccatgacctgggtccgccaggctccagggaaggggctggaatgggtctcagttattagtggtagtggcgggagcacatactacgcagactccgtgaagggccggttcaccatctccagagacaattccaacaacacgctgtatctgcaaatgaacagcctgagagtcgaggacacggccgtatattactgtgcgaaaaccatcccctattatgatgatttgactggtagaacgtacgactggttcgacccctggggccagggaaccctggtcaccgtctcctcag

SEQ ID NO: 120 - DNA, 367 bp, synthetic construct
  misc_feature 1..367: note = Description of sequence: Sequence Name: 71281-2
  source 1..367: mol_type = other DNA
caggtgcaggtggtgcagtctggggctgaagtgaggaagcctggggcctcagtgaagatctcctgtaagacatctggattcacatttaccagttatgttatgtattgggtgcgccaggcccctggacaagggcttgagtggatgggactgatcaacccgaatacactcatcacacgcaacgcacaaggatttgagggcagactcaccatgaccagggacacgtccacgagtacagtctacatggaactgaataggctgacatctgacgacacggccgtctattactgtgcgagaggaatgatgggggtcactggagccgactactttggcttctggggccggggagtccctgtcaccgtctcctccg

SEQ ID NO: 121 - DNA, 358 bp, synthetic construct
  misc_feature 1..358: note = Description of sequence: Sequence Name: 71281-3
  source 1..358: mol_type = other DNA
gaggtgcagctggtggagtctgggggagacttggtccagcctggggggtccctgagactctcctgtgcagcctctggattaacctttagtatttattggatgagctgggtccgccaggctccagggaaggggctggagtgggtggccaacataaagcaagatggaggtgagaaatactatgtggactctgtgaagggccgattcaccatctccagagacaacgccaagaagttagtgtatctgcaaatgaacagcctgagagccgaggacacggccgtgtattattgtgtgagttgttctagcagcagctgggaatttgactactggggccagggaaccctggtcaccgtctcctcag

SEQ ID NO: 122 - DNA, 394 bp, synthetic construct
  misc_feature 1..394: note = Description of sequence: Sequence Name: 71281-4
  source 1..394: mol_type = other DNA
gaggtgcagctggtggagtctgggggaggcttggtccagcctggggggtccctgagactctcctgttcagcctctggattcaccttcagtaactatgctatgaactgggtccgccaggctccagggaagggactggaatttgtttcaggtattaatgataatgggggtagcacatactacgcagactcagtgaagggcagattcaccatctccagagacaattccaagaacacactgtatcttcaaatgagcagtctgagagctgaggacacggctgtatattactgtgtgaaaactaccggcgcttggggggacgtctttgactatgattcggggacttatctataccactttgactactggggccagggaaccctggtcaccgtctcctcag

SEQ ID NO: 123 - DNA, 376 bp, synthetic construct
  misc_feature 1..376: note = Description of sequence: Sequence Name: 71281-5
  source 1..376: mol_type = other DNA
gaggtgcagctgttggagtctgggggaggcttggtacagcctggggggtccctgagactctcctgtgcagcctctggattcacctttaacaactatgccatgagctgggtccgccaggctccagggatggggctggagtgggtctcaggtgtcagtgctagtggtggtaccacatactacgcagactccgtgaagggccggttcaccatctccagagacaattccaagaacaccctgtttctgcaaatgaacagcctgagagccgacgacacggccgtatattattgtgcgaacctgataagtttggtggacgatttttggagtgattattatgacgactactggggccagggaaccctggtcaccgtctcttcag

SEQ ID NO: 124 - DNA, 364 bp, synthetic construct
  misc_feature 1..364: note = Description of sequence: Sequence Name: 71281-6
  source 1..364: mol_type = other DNA
caggtgcacctggtggagtctgggggaggcgtggtccagcctgggaggtccctgagactctcctgtgcagcctctggattcaccttcagtacttatggcatgcactgggtccgccaggctccaggcaaggggctggagtgggtggcacttatatcatttgatggaagtattaaatattacgcagagtccgtgaagggccgattcaccatctccagagacaattccaagaacacgctgtatgtacagatggacagcctgagaactgaggacacggctgtttattactgtgcgagaagtcctggtactgcctggggtggctacatggacgtctggggccaagggaccacggtcaccgtctcctcag

SEQ ID NO: 125 - DNA, 358 bp, synthetic construct
  misc_feature 1..358: note = Description of sequence: Sequence Name: 71281-7
  source 1..358: mol_type = other DNA
gacctgcagctgttggagtctgggggaggcctggtccagcctggggggtccctgagactctcctgtgcagcctctggattcatctttagtcattatgacatgagttgggtccgccaggctccagggaaggggctggagtgggtctcgtctatgagtggtagtggtggtgctatatactacgctgcctccgtgaagggccgcttcatcatctccagagacaattccagggacactctgtatctgcagatgaccagcctgagagccgaggacacggccctctactactgtgcgaggcaaaagcagcagtatttctactttgactactggggccagggaaccctggtcaccgtctcctcag

SEQ ID NO: 126 - DNA, 373 bp, synthetic construct
  misc_feature 1..373: note = Description of sequence: Sequence Name: 71281-8
  source 1..373: mol_type = other DNA
cagctgcagctgcaggagtcgggcccaggactggtgaagccttcggagaccctgtccctcacctgcactgtctctggtggctccatcagcagtagtagttactactggggctggatccgccagccccccgggaaggggctggaatggattggaaatatctattatagtgggagcacctactacaacccgtccctcagaagtcgagtcaccatatccgtagacacgttcaagagccacttctccctgaacctgaactccgtgaccgccgcagacacgtctatatattactgtgcgcgactgaaagttgggccagcgcctggtactcgggtttttgactactggggccagggaaccctggtctccgtctcctcag

SEQ ID NO: 127 - DNA, 364 bp, synthetic construct
  misc_feature 1..364: note = Description of sequence: Sequence Name: 71281-9
  source 1..364: mol_type = other DNA
gaggtgcagctggtgcagtctggagcagaggagaaaaagcccggggagtctctgaagatctcctgtaagggttctgaattcaactttgtcaactactgggtcgcctgggtgcgccagatgcccgggaaaggcctggagtggatggggatcatctttcctggtgactctggtaccagatacagcccgtccttccaaggccaggtcaccatctcagccgacaagtccatcagcaccgcctacctgcagtggagcagcctgaaggcctcggacaccgccatatattactgtgcgacaccctcatcagggcgtacgggggagggtatggacgtctggggccaagggaccacggtcaccgtctcctcag

SEQ ID NO: 128 - DNA, 352 bp, synthetic construct
  misc_feature 1..352: note = Description of sequence: Sequence Name: 71281-10
  source 1..352: mol_type = other DNA
gaggtgcaggtggtggagtctgggggaggcttggtccagcctggggggtccctgagactctcctgtgcagcctctggattcatttttagtgactcttggatgggttgggtccgccaggctccagggaaggggctggagtgggtggccaacataaagagtgatggaagtacgaaatattatgtgggctctgtgaggggccgattcaccatctccagagacaacgcccagaactcagtgtatctgcaattgaactccctgagagccgaggacacggctacatattattgtgcgagacacggtgactacgcctttgactcctggggccagggaaccctggtcaccgtctcctcag

SEQ ID NO: 129 - DNA, 361 bp, synthetic construct
  misc_feature 1..361: note = Description of sequence: Sequence Name: 71281-11
  source 1..361: mol_type = other DNA
caggtgcagctggtgcagtctggggctgaggtgaagaagcctgggtcctcggtgaaggtctcctgcaaggcttctggcggcaccctcagcacctatactgtcagctgggtgcgacaggcccctgggcaaggtcttgagtggatggggggcatcatccctgtttttggtacatcagactacgcaaagaaattccagggcagagtctcgattaccgcggacgagcccacgaatacagcctacatggaactgaacagtctgcgatctgaagacacggccttttatttctgtgcgcggggacaaccgtatagcatctcgccttttgagtcctggggccagggaaccctggtcaccgtctcctcaa

SEQ ID NO: 130 - DNA, 385 bp, synthetic construct
  misc_feature 1..385: note = Description of sequence: Sequence Name: 71281-12
  source 1..385: mol_type = other DNA
cagctgcagctgcaggagtcgggcccaggactggtgaagccttcggagaccctgtccctcacctgctctgtctctggtgactccatcagcagtagtaattactactggggctggatccgccagcccccagggaaggggctggagtggattgggactatctattatagtgggaccacctactacaacccgtccctcaagagtcgagtcaccatatccgtagacacgtccaagaaccagttctccctgaacctgagctctgtgaccgccgcagacacggctgtctattactgtgcgagacacgattcggcagccctcgccggggactggagcagcggctggccctttgactactggggccagggaaccctggtcatcgtctcctcag

SEQ ID NO: 131 - DNA, 379 bp, synthetic construct
  misc_feature 1..379: note = Description of sequence: Sequence Name: 71281-13
  source 1..379: mol_type = other DNA
cagaagcagttggtgcagtctggagctgaggtgaagaagcctggggcctcagtgaaggtctcctgcaaggcttctggttacagtttcaccagttatggcatcacctgggtgcgacaggcccctggacaagggcttgagtgggtgggatggatcagcggtcacaatggtaacacagactatgcacagaagttccaggacagagtcaccttgaccacagacacatccacgaacacagcctacttggaactgaggagcctgaaatctgacgacacggccgtgtattactgtgcgagagatcccagaatcgtggtcatggtagctgctaatcgacgaagaattgactactggggccagggaaccctggtcgccgtctcctcag

SEQ ID NO: 132 - DNA, 376 bp, synthetic construct
  misc_feature 1..376: note = Description of sequence: Sequence Name: 71281-14
  source 1..376: mol_type = other DNA
caggtgcagctggtggagtctgggggaggcttggtcaagcctggagggtccctgagactctcctgtgcagcctctggattcaccttcactgactactacatgacttggatgcgccaggctccagggaaggggctggagtgggtttcatacattagtagtagtggtgattacacaaactacgcagactctgtgaagggccgattcaccatctccagagacaacgccaggaactcactgtatctgcaaatgaacagcctgagagccgaggacacggctgtgtatttttgtgcgagagataccgttcccaattgtggtactaagtgctatcttacctttgactactggggccagggaaccctggtcaccgtctcctcag

SEQ ID NO: 133 - DNA, 384 bp, synthetic construct
  misc_feature 1..384: note = Description of sequence: Sequence Name: 71281-15
  source 1..384: mol_type = other DNA
gaagtgcagctggtggagtctgggggaggcttggtaaggcctggtgagtctcttagactctcctgtgtagcccctgattccactttcattaacgcctggatgaactgggtccgccaggctccagggcaggggctggagtgggtcggccggattagaagcaagcgcgacggtgggacgacagaccacgctgcacccgtgagaggcagattcagagtctcaagagatgattcaaaaaacacggtgtatctgcagatgaacagcctgaaagtcgaggacacaggcgtgtattactgtgcctcacatctcagtggttcggggacttatcacccaccccagtacggtttggacgtctggggcctagggaccacggtcaccgtctcctca

SEQ ID NO: 134 - DNA, 361 bp, synthetic construct
  misc_feature 1..361: note = Description of sequence: Sequence Name: 71281-16
  source 1..361: mol_type = other DNA
gaggtgcagctggtggagtctgggggaggcttggtccagcctggggggtccctgaaactctcctgtgcagcctctgggttcaccttcagtggctctgctatgcactgggtccgccaggcttccgggaaagggctggagtgggttggccgtattagaagcaaagctaacagttacgcgacagcatatgctgcgtcggtgaaaggcagattcaccatctccagagatgattcaaagaacacggcgtatctgcaaatgaacagcctgaaaaccgaggacacggccgtatattactgtactagaatccagaggacggaaggctttgactactggggccagggaaccctggtcaccgtctcctcag

SEQ ID NO: 135 - DNA, 376 bp, synthetic construct
  misc_feature 1..376: note = Description of sequence: Sequence Name: 71281-17
  source 1..376: mol_type = other DNA
gaggtgcagctggtggagtccgggggaggcttagttcagcctggggggtcccggagactctcctgtgcagcctctggattcaccttcagtgcctactggatgtactgggtccgccaagctccagggaaggggctggtgtgggtctcacgtattaatagtgatggcagtagcgcaagctacgcggactccgtgaagggccgattcaccatctccagagacaacgccaagaacactctttatttgcaaatgaacagtctgagagtcgaggacacggctgtctattactgtgcaagagatggtcttatctctgtttcggggagttattatggtctgccgggcgtctggggccaagggaccacggtcaccgtctcctcag

SEQ ID NO: 136 - DNA, 340 bp, synthetic construct
  misc_feature 1..340: note = Description of sequence: Sequence Name: 71281-18
  source 1..340: mol_type = other DNA
gaggtgcagttggtggagactggaggaggcttaatccagcctggggggtccctgagactctcctgtgtagtctctgggttcaccgtcggtagcaactacatgagctgggtccgccaggctccagggaagcgtctggagtgggtctcagttctttatgccggtggaagcacatactacgcggagtccgtcaagggccgattcaccgtctccagagacgagtccaggaacacactatttcttcaaatgcatagtctgagagtcgaggacacggccgtctattattgtgcgagaagagacgggtcgcactggggccagggaacgtcggtcaccgtctcctcaa

SEQ ID NO: 137 - DNA, 390 bp, synthetic construct
  misc_feature 1..390: note = Description of sequence: Sequence Name: 71281-19
  source 1..390: mol_type = other DNA
caggtgcagctggtgcagtctggggctgaggtgaagaagcctggggcctcagtgaaggtctcctgcaaggcttctggatacaccttcaccggctactatatgcactgggtgcgacaggcccctggacaagggcttgagtggatgggatggatcaaccctaacagtggtggcacaaactatgcacagaagtttcagggcagggtcaccatgaccagggacacgtccatcagcacagcttacatggagttgagcaggctgagatctgacgacacggccgtgtattactgtgcgagagattgggacggggatgatagtagtgtttattatagggtctacaactactacggtatggacgtctggggccaagggtccacggtcaccgtctcctca

SEQ ID NO: 138 - DNA, 367 bp, synthetic construct
  misc_feature 1..367: note = Description of sequence: Sequence Name: 71281-20
  source 1..367: mol_type = other DNA
gcggtgcagctggtggagtccgggggaggcttagttcagcctggggggtccctgagactctcctgcgcagcctctggatttcccttcactacctactggatgcactgggtccgccaagccccagggaaggggccggtgtgggtctcaggtattaatcttgatggcagtgttacaacctatgcggactccgtgaagggccgattcaccatctccagagacaacgccaagaacatgctgtatctgcaaatgaacagtctgagagccgaggacacgggtgtgtattactgtgcaagacagtttcttcgcggagtggtgattaactggttcggcccctggggccagggaaccctggtcaccgtctcctcag

SEQ ID NO: 139 - DNA, 375 bp, synthetic construct
  misc_feature 1..375: note = Description of sequence: Sequence Name: 71281-21
  source 1..375: mol_type = other DNA
cagctgcagctgcaggagtcgggcccaggactggtgaagccttcggagaccctgtccctcacctgcactgtctctggtggttccatccgcagtagtgattactactggggctggatccgccagccccccgggaaggggctggagtggattgggactatctattatagtgggaccaggtactacaacccgtccctcaagggtcgaatcaccatatccgcagacacgtccaagaaccagttctccctgaagctgagctctgtgaccgccgcagacacggctgtctattactgtgcgagacagaggaaggcagctcgtcctatctactactactacatggacgtctggggcaaagggaccacggtcaccgtctcctca

SEQ ID NO: 140 - DNA, 372 bp, synthetic construct
  misc_feature 1..372: note = Description of sequence: Sequence Name: 71281-22
  source 1..372: mol_type = other DNA
caggtgcagctgcaggagtcgggcccaggactggtgaagccttcacagaccctgtccctcacctgcactgtctctggtgactccatcagcagtggtggttactactggagctggatccgccagcacccagggaagggcctggagtggattgggtacatctattatggtgggaacacctactacaacccgtccctcaagagtcgcgccaccatatcagtagacacgtctaagaaccacttctccctgaagctgaggtctgtgactgccgcggacacggccgtatattactgtgcgagagccctcggtgacctgccttactactactacggtctggacgtctggggccaagggaccacggtcaccgtctcctca

SEQ ID NO: 141 - DNA, 367 bp, synthetic construct
  misc_feature 1..367: note = Description of sequence: Sequence Name: 71281-23
  source 1..367: mol_type = other DNA
caggtgcagctgcaggagtcgggcccaggactggtgaagccttcggggaccctgtccctcacctgcgcagtctctggtgactccatcagtagtagtgactggtggaattgggtccgccagtccccagggaaggggctggagtggattggggaaatctatcatggtgggcacaccatctacaacccgtccctcaagagtcgagtcaccatgtcagtagacaagtccaacaaccaattctccctgaacctgacctctatgaccgccgcggacacggccatttattactgtgcgagagatcattccggcccaggcaacagctggtcctttgactactggggccagggaatcctggtcaccgtctcctcag

SEQ ID NO: 142 - DNA, 358 bp, synthetic construct
  misc_feature 1..358: note = Description of sequence: Sequence Name: 71281-24
  source 1..358: mol_type = other DNA
gaagtgcagctggtgcagtccggagcagaggtgaaaaagcccggggagtctctcaggatctcctgtaaggattctggatacagctttaccacctactggatcagctgggtgcgccagatgcccgggaaaggcctggagtggatggggaggattgatcctagtgactcttataccaactacagcccgtccttccaaggccacgtcaccatctcagctgacaagtccatcagcactgcctacctgcagtggagcagcctgaaggcctcggacaccgccatgtattactgtgcgagacatggggcgaaccccactgcttttgatatctggggccaagggacaatggtcaccgtctcttcag

SEQ ID NO: 143 - DNA, 376 bp, synthetic construct
  misc_feature 1..376: note = Description of sequence: Sequence Name: 71281-25
  source 1..376: mol_type = other DNA
gaggtgcagctgttggagtctgggggaggcttggtacagcctggggggtccctgagactctcctgtgcagcctctggattcacctttagcagctatgccatgagctgggtccgccaggccccagggaaggggctggagtgggtctcagttattagtggtagtggtggtaccacactctacgcagactccgtgaagggccggttcaccatctccagagacaattccaagaacacgctgtatctgcaaatgaaaagcctgagagccgaggacacggccgtatattactgtgcgaggactcgggatattgtattactgccaactgttgtggcgggcgactcggactggggccagggaaccctggtcaccgtctcctcag

SEQ ID NO: 144 - DNA, 364 bp, synthetic construct
  misc_feature 1..364: note = Description of sequence: Sequence Name: 71281-26
  source 1..364: mol_type = other DNA
gaggtgcagttgctggagtctgggggaggcgtggtacagcctggggggtccctgagactctcctgtgcagcctctggattcgcctttagcaactatgccatgacctgggtccgccaggctccagggaaggggctggagtgggtcgcaactattagttatggtggtgataacacatactacgcagactccgtgaagggccggttcaccatctccagagacaattccatgaacacactatatctgcaaatgaacagcctgagagccgaggacacggccgtttattactgtgtgtctcccggtgacaacgttcctgactggtatttcgatctctggggccgtggcaccctggtcactgtctcctcag

SEQ ID NO: 145 - DNA, 379 bp, synthetic construct
  misc_feature 1..379: note = Description of sequence: Sequence Name: 71281-27
  source 1..379: mol_type = other DNA
cagctgcagttgcaggagtcgggcccaggactggtgaagccttcggagaccctgtccctcacatgcactgtttctggtggctccatcagcagtagtagttactactggggctggatccgccaggccccagggaaggggctagagtggattgggaatatctattatcgtgggagcacctactacaacccgtccctcaagagtcgagtcaccatatccgtagacacgtccaagagccagttttccctggagctgagctctgtgaccgccgcagacacggctgtatattactgtgcgagacgtggtctccttctgctggcagtggctggtagcggggcttttggtatctggggccaagggacaatggtcaccgtctcttcag

SEQ ID NO: 146 - DNA, 384 bp, synthetic construct
  misc_feature 1..384: note = Description of sequence: Sequence Name: 71281-28
  source 1..384: mol_type = other DNA
caggtgcaactagtgcagtctggggctgaagtgaagaagcctggggcctcagtgaaggtctcctgtcaggcttctggatacagttttaacgcctactatatgcactgggtgcgacaggcccctggacaagggcctgagtggatgggacggatcaaccctcacagtggtgacatacactatgcacaaaagtttcaggacagggtcaccatgaccagggacacgtccatcagcacagtttacatggaattgagtagattgagatctgacgacacggccgtgtattactgtgcgagagatgcgaaacgatttttggagtggtccgaaatctacttatactggtacatggacgtctggggcaaagggaccacggtcatcgtctcctca

SEQ ID NO: 147 - DNA, 372 bp, synthetic construct
  misc_feature 1..372: note = Description of sequence: Sequence Name: 71281-29
  source 1..372: mol_type = other DNA
gaagtgcagctggtgcagtctggagcagaggtgaaaaagcccggggagtctctgaggatctcctgtaagggttctggatacagctttaccagctactggatcagctggatgcgccagatgcccgggaaaggcctggagtggatggggaggattgatcctactgactcttataccaattacagcccgtccttccaaggccacgtcaccatctcagctgacaagtccatcagcactgcctacctgcagtggagtagcctgaaggcctcggacaccgccatgtactactgtgcgaaagactacggtgactacgacttgggctactactacgctatggacgtctggggccaagggaccacggtcaccgtctcctca

SEQ ID NO: 148 - DNA, 364 bp, synthetic construct
  misc_feature 1..364: note = Description of sequence: Sequence Name: 71281-30
  source 1..364: mol_type = other DNA
caggtgcaggtggtggagtcggggggaggcttggtcaagcctggagggtccctgagactctcctgtgtagcctctggattcgctttcagtgacgattacatgagttgggtccgccaggctccggggaaggggctggagtggatttcatacattggtggtgatggcacttacaaaaattacgcagtctctgtgaagggccggttcaccatttctagagacaacgacaacaactcagtgcatctgcaattgaacggcctgagagtagacgacacggccgtgtattattgtgtgagaggccttggagtgggagctactggtcaccctcgctattggggccagggaaccctggtcaccgtctcctcag

SEQ ID NO: 149 - DNA, 385 bp, synthetic construct
  misc_feature 1..385: note = Description of sequence: Sequence Name: 71281-31
  source 1..385: mol_type = other DNA
caggtgcagctggtggagtcggggggaggcgtggtccagcctgggaggtccctgagactctcctgtgcagcctctggattcaccttcagtcgctatggcatgcattgggtccgccaggctccaggcaaggggctggagtgggtggcatttatatcatatgatggtgataataaatactatgcagactccgtgaagggccgattcaccatctccagagacaattccaagaacacgctgtatctgcaaatggacagcctgagaactgaggacacggctgtgtattactgtgcgaaagacccgacagcccgacttgggtattgtagaggtggtagctgctacttggccgactactggggccagggaaccctggtcaccgtctcctcag

SEQ ID NO: 150 - DNA, 358 bp, synthetic construct
  misc_feature 1..358: note = Description of sequence: Sequence Name: 71281-32
  source 1..358: mol_type = other DNA
cagatcaccttgaaggagtctggtcctacgctggtgaaacccacacagaccctcacgctgacctgcaccttctctgggttctcactcagcactagtggagtgggtgtgggctggatccgtcagcccccaggaaaggccctggagtggcttgcagtcacttattgggatggtgatacgcgctacagtccatctctgaagagcaggctcaccatcaccaaggacacctccaaaaacctggtggtccttacaatgaccaacatggaccctgtggacacagccacatattactgtgtacaccatacaataactatgatagtaggctactggggccagggagccctggtcaccgtctcctcag

SEQ ID NO: 151 - DNA, 352 bp, synthetic construct
  misc_feature 1..352: note = Description of sequence: Sequence Name: 71281-33
  source 1..352: mol_type = other DNA
gacgtgcacctggtggagtctgggggaggcttggtccagcctggggggtccctgagactctcctgtgcagcctctgaaatcatcgtcagtgtcaactatatgaactgggtccgccaggctccagggaaggggctggagtgggtctcagttatttatagcggtggtagcactttctacgcagattccgtgaagggccgattcaccatctccagagacaattccaagaacacattgtatcttcaaatgaacagcctgagaattgaggacacggctgtgtattactgtgcgagaggtttcggtgaccactactttaactcctggggccagggaaccctggtcaccgtctcttcag

SEQ ID NO: 152 - DNA, 367 bp, synthetic construct
  misc_feature 1..367: note = Description of sequence: Sequence Name: 71281-34
  source 1..367: mol_type = other DNA
caggtgcaactggtggagtctgggggaggcgtggtccagcctggggcgtccctgagactctcctgtgcagcctctgggttcaatttcagttactctgctatgcactgggtccgccaggctccaggcaaggggctggagtgggtggcagtcatatcatatgatggaaccagtaagtaccagagagactccctgaaggaccgattgaccgtctccagagacaactccaggagcacagtgtttctggaaatgaacagcctgagagcagaggacacgggtgtgtattactgtgcgagagattactatgccaggagctgggacggctactttgaccactggggccagggaaccctggtcaccgtctcctcag

SEQ ID NO: 153 - DNA, 352 bp, synthetic construct
  misc_feature 1..352: note = Description of sequence: Sequence Name: 71281-35
  source 1..352: mol_type = other DNA
gaggtgcagctggtggagtctggaggaggcttgatccagcctggggggtccctgagactctcctgtgcagcctctgggttcaccgtcagtcgcaactacatgagctgggtccgccaggctccagggaaggggctggagtgggtctcacttatttatagcggtggtagcacatactacgcagactccgtgaagggccgattcaccatctccagagacaattccaagaacacgctgtatcttcaaatgatcagcctgagggccgaggacacggccgtatattactgtgcgagagagaccccaggctacggtgacgaagcctggggccagggaaccctggtcaccgtctcctcag

SEQ ID NO: 154 - DNA, 370 bp, synthetic construct
  misc_feature 1..370: note = Description of sequence: Sequence Name: 71281-36
  source 1..370: mol_type = other DNA
caaatgcagctggtgcagtctgggcctgaggtgaagaagcctgggacctcagtgaagatcccctgcagggcttctgggttcaccttttttacctcttctgtacagtgggtgcgacaggctcgtggacaacgccttgagtggataggatggatcgtcgttggcagtggtaagacaatctacgcacagagattccaggaaagagtcaccattaccagggacatgtccacaaacacagcctatatggagctgagcagcctgagatccgaggacacggccgtgtattactgtgcggcgccaaattgtactggtggttcctgctttgatggttttaatctctggggccaagggacacaggtcaccgtctcttcag

SEQ ID NO: 155 - DNA, 358 bp, synthetic construct
  misc_feature 1..358: note = Description of sequence: Sequence Name: 71281-37
  source 1..358: mol_type = other DNA
gaggtgccgctggtggaatctggaggaggcttgatccagcctggggggtccctgagactctcctgtgcagcctctgggttcaccgtcagtagtaactacatgtattgggtccgccaggctccagggaaggggctggagtgggtctcactgatttatcccggtggaactacatactatgcagactccgtgaagggccgattcaccatctccagagacaattccaagaacacgctgtggcttcaaatgaacagcctgagagccgaggacacggccgtctatttctgtgcgagaggcccttattgtcgtggtgctggctgccgtccctggggccagggaaccctggtcaccgtctcctcag

SEQ ID NO: 156 - DNA, 396 bp, synthetic construct
  misc_feature 1..396: note = Description of sequence: Sequence Name: 71281-38
  source 1..396: mol_type = other DNA
caggtgcaactggtgcaatctgggtctgagttgaagaagcctggggcctcagtgaaggtttcctgcaaggcttcgggatacaccttcactaggtatgctgtgaattgggtgcgacaggcccctggacaaggacttgagtggatgggatggatcaacacgaacactggaaacccaacctatgcccaggacttcacaggacggtttgtcttctccttggatacctctgtcaacacggcatatctgcagatcagcagcctaaaggctgaagacactgccgtgtattactgtgcgagcgtcccacacccacattgtagtagtaccagctgctatgccggcgactactactacttcggtgtggacgtctggggccaagggaccacggtcaccgtctcctca

SEQ ID NO: 157 - DNA, 354 bp, synthetic construct
  misc_feature 1..354: note = Description of sequence: Sequence Name: 71281-39
  source 1..354: mol_type = other DNA
caggtgcagctggtggagtctgggggaggcgtggtccagcctggggggtccctgagactctcctgtgcagcctctggattcaccttcagtacctatgctatccactgggtccgccaggctccaggcaaggggctggagtgggtggcagcgatatcatatgatggatacaataaacagtacgcagactccgtgaagggccgtttcaccatctccagagacaattccaacaacacgctgtatctgcaaatgttcagcctgagaactgaagacacggctgtatattactgtgcgagagatactaccccctacggtatggacgtctggggccaagggaccacggtcaccgtctcctca

SEQ ID NO: 158 - DNA, 373 bp, synthetic construct
  misc_feature 1..373: note = Description of sequence: Sequence Name: 71282-1
  source 1..373: mol_type = other DNA
gaggtgcagctgttggagtctgggggaggcttggtacagcctggggggtccctgagactctcctgtgcagcctctggattcacctttagcagctatgccatgagctgggtccgccaggctccaggaaaggggctggggtgggtctcagctataagtggtggtggtggtagtacatactacgcagactccgtgaagggccggttcaccatctccagagacaattccaagaacacgctctatctgcaaatgaacagcctgagagccgaggacacggccgtatattactgtgcgaaatattactatgatattagtgcttattacatccccaactttgactactggggccagggaaccctggtcaccgtctcctcag

SEQ ID NO: 159 - DNA, 364 bp, synthetic construct
  misc_feature 1..364: note = Description of sequence: Sequence Name: 71282-2
  source 1..364: mol_type = other DNA
gaggtgcagctgttggagtctgggggaggcttggtacagcctggggggtccctgagactctcctgtgtagcctctggattcacctttagcagctatcccatgagctgggtccgccaggctccagggaaggggctggagtgggtctcaggtatcactgctaccacatactacgcagactccgtgaagggccgattcaccatctccagagacaattccagggacacgctgtatctgcagatgaacagcctcagagccgaggacacggccgtgtattactgtgcgaagcatcttaagccttgtagtgacagctgctatgccacccttgactactggggccagggaaccctggtcaccgtctcctcag

SEQ ID NO: 160 - DNA, 364 bp, synthetic construct
  misc_feature 1..364: note = Description of sequence: Sequence Name: 71282-3
  source 1..364: mol_type = other DNA
cagttgcagctgcaggagtcgggcccaggattggtgaagtcctcggagaccctgtccctcacctgctctgtctctggtggctccatcagaactactagttattactgggcctgggtccgccagcccccagggaagggcctggagtggattggcagtatgtactatactgggagcacctactacaacccgtccctcgggaatcgagtcaccatctccgtagacacgtcgaagcagttctccctgaaactgagctcagtgaccgccgcagacacggctgtgttttactgtgctagacattcacgcagtagaggtggctacacttacgactattggggccagggaaccctggtcaccgtctcctcag

SEQ ID NO: 161 - DNA, 367 bp, synthetic construct
  misc_feature 1..367: note = Description of sequence: Sequence Name: 71282-4
  source 1..367: mol_type = other DNA
caggtccagctggtgcagtctggggctgaggtgaagaagcctggatcctcggtgaaggtctcctgcaaggcttctggaggcaccttcagcacctctgctatcagctgggtgcgacaggcccctggacaagggcttgagtggatgggagggatcatccctttctttggtacaccaaactacgcacagaagtttcagggcagagtcacgattaccgcggacgagtccacgagcacagtctacatggacctgagcagcctgagatctgaggacacggccgtgtattactgtgcgaatgactataccagcagtggctggtacactccccttgactactggggccagggaaccctggtcaccgtctcctcag

SEQ ID NO: 162 - DNA, 370 bp, synthetic construct
  misc_feature 1..370: note = Description of sequence: Sequence Name: 71282-5
  source 1..370: mol_type = other DNA
gaggtgcaggtgttggagtctgggggaggcttggtacagcctggggggtccctgaggctctcctgtgcagcctctggattcacctttagcagctatgccatgacctgggtccgccaggctccagggaagggactggagtgggtctcaactattagtggtgatggtgctagcacattctacgcagactccgtgaggggccggttcaccctctccagagacaattccaagaacaccctgtatctgcaaatgaacagcctgagagccgaggacacagccgtgtattactgtgcgaaagatctggaggactacggtgacttcgcggcatgttttgactcctggggccagggacgcctggtcaccgtctcctcag

SEQ ID NO: 163 - DNA, 379 bp, synthetic construct
  misc_feature 1..379: note = Description of sequence: Sequence Name: 71282-6
  source 1..379: mol_type = other DNA
gaggtgcagctggtggagtcggggggaggcttggtacagcctggggggtccctgagactctcctgtgcagcctccggattcaccttcagtagttatagtatgaagtgggtccgccaggctccagggaaggggctggagtggatttcagacatcagtagtagtagcagcaccatatactacgcagactctgtgaagggccgattcaccatcttcagagacaacgccaagaattcactctatctgcaaatgaacagcctgagagccgaggacacggctgtgtactactgtgcgagagatggggattattatgatagtagtggtcactctcgagaagcttttgatatctggggccaagggacaatggtcaccgtctcttcag

SEQ ID NO: 164 - DNA, 364 bp, synthetic construct
  misc_feature 1..364: note = Description of sequence: Sequence Name: 71282-7
  source 1..364: mol_type = other DNA
caggtgcagctggtggagtctgggggaggcgtggtccagcctgggaggtccctgagactctcctgtgcagcctctggattcaccttcagaagtcatagtatccactgggtccgccaggctccaggcaaggggctggagtgggtggctgttatatcatatgatggatacaataaatactacgcagactccgtgaagggccgattcaccatgtccagagacaattcccagaacacgttgtatctgcagatgaacagcctgagagttgaggacacggctgtgtattactgtgcgagagcgggcggggggacctactacagttggttcgacccctggggccagggaaccctggtcaccgtctcctcag

SEQ ID NO: 165 - DNA, 376 bp, synthetic construct
  misc_feature 1..376: note = Description of sequence: Sequence Name: 71282-8
  source 1..376: mol_type = other DNA
gaggtgcagctggtggagtctgggggaggcttggtccagcctggggggtccctgagactctcctgtgcagcctctggattcagccttagtagctattggatgagctgggtccgccaggctccagggaaggggctggagtgggtggccaacataaaccgagatggaagtgagaaatactctgtggactctgtgaagggccgattcaccatctccagagacaacaccaaaaattcactgtatctgcacatgaacagcctgagagtcgaggacacggccgtgtattactgtgcgcgagaccctaccagccactggttggtcggggagcccccctactttgactactggggccagggaaccctggtcatcgtctcctcag

SEQ ID NO: 166 - DNA, 361 bp, synthetic construct
  misc_feature 1..361: note = Description of sequence: Sequence Name: 71282-9
  source 1..361: mol_type = other DNA
gaggtgcagctggtggagtctgggggaggtctggtcaagccgggggggtccctgagactctcctgtgcagcctctggattcacgttcagcagctataacatgcactgggtccgccaggctccagggaagggcctggagtgggtctcattcattagtactagtagtgattacatatactacgcagactcagtgaagggccgattcaccatctccagagacaacgccaagaactctctgtatctgcaaatgaacagcctgagagccgaggacacggctgtgtattactgtgcgagagatgtgataggggagtgggagccacatgcctactggggccagggaaccctcgtcaccgtctcgtcag

SEQ ID NO: 167 - DNA, 364 bp, synthetic construct
  misc_feature 1..364: note = Description of sequence: Sequence Name: 71282-10
  source 1..364: mol_type = other DNA
caggtgcagctggtggagtctgggggaggcgtggtccagcctgggaggtccctgagactctcctgtgtagcctctggattcaccttctatacctatgctatgcactgggtccgccaggctccaggcaaggggctggagtgggtggcacttatctcatatgatggaattaataaatactacacagactccgtgaggggccgattcaccatctccagagacaattccaagaacacgctgtatctccaaatgaacggcctgagaggtgatgacacggctgtttattactgtgcgagagcgtatggtgggagctacagcggggcttttgatatctggggccaagggacaatcgtcaccgtctcttcag

SEQ ID NO: 168 - DNA, 363 bp, synthetic construct
  misc_feature 1..363: note = Description of sequence: Sequence Name: 71282-11
  source 1..363: mol_type = other DNA
gaggtgcagctggtggagtctggaggaggcttggtccagcctggggggtccctgagactctcctgtgcagcctctgggttcaccgtcagtagcaactacatgagctgggtccgccaggctccagggaaggggctggagtgggtctcagttatttatagcggtggtagcacatactacgcagactccgtgaagggccgattcaccatctccagacacaattccaagaacacgctgtatcttcaaatgaacagcctgagagctgaggacacggccgtgtattactgtgcgagagatagggggggccggtcgtttttagacggtatggacgtctggggccaagggaccacggtcaccgtctcctca

SEQ ID NO: 169 - DNA, 385 bp, synthetic construct
  misc_feature 1..385: note = Description of sequence: Sequence Name: 71282-12
  source 1..385: mol_type = other DNA
caggtgcagctggtgcagtctggggctgaggtgaagaagcctgggtcctcggtgaaggtctcctgcagggcttctggaggcaccttcagcagctatgctatcagctgggtgcgacaggcccctggacaagggcttgagtggatgggagggatcatccctatctttggtacagcaaactacgcacagaaattccagggcagagtcacgattaccgcggacgaatccacgagcacagcctacatggaggtgagcagcctgagatctgaggacacggccgtgtattactgtgcgagaacggtgactcccatccgatattgtactagtaccagctgctttacgcgccttcactactggggccagggaaccctggtcaccgtctcctcag

SEQ ID NO: 170 - DNA, 367 bp, synthetic construct
  misc_feature 1..367: note = Description of sequence: Sequence Name: 71282-13
  source 1..367: mol_type = other DNA
gaggtgcagttggtggagtcggggggaggcttggtccaccctggggggtccctgagactctcctgtgcagcctctggattcaccgtcagttccaactacatgaactgggtccgccaggctccagggaaggggctggagtgggtctcagttatttataccggtggtagcacatactacgcaggctccgtgaagggcagattcaccatctccagagacaattccgagaacacgctgtatcttcaaatgaatggtctgagagccgaggacacggctgtatattactgtgcgagagatccgttagtgggaactactcgacttcatgcttttgatatctggggccaagggacgatggtcaccgtcgctccag

SEQ ID NO: 171 - DNA, 379 bp, synthetic construct
  misc_feature 1..379: note = Description of sequence: Sequence Name: 71282-14
  source 1..379: mol_type = other DNA
caggtgcagctggtggagtctgggggaggcgtggtccagcctgggaggtccctaagactctcctgtgcagcctctggattcaccttcagaagctatggcatgcactgggtccgccaggctccaggcaaggggctggagtgggtggcagttatatcatatgatggaagtaataaatactatgcagactccgtgaagggccgattcaccatctccagagacaattccaagaacacgctgtatctgcagatgaacagcctgagagctgaggacacggctgtgtattactgtgcggcagtcgtggatattgtagtagtacccagtattatattgctgccgcctgactactggggccagggatccctggtcaccgtcgcctcag

SEQ ID NO: 172 - DNA, 379 bp, synthetic construct
  misc_feature 1..379: note = Description of sequence: Sequence Name: 71282-15
  source 1..379: mol_type = other DNA
gaggtgcagctgttggagtctgggggaggcttggttcagcctggggggtccctgagactctcctgtgtagcctctggattcaccttcagcaactatgccatgagctgggtccgccaggctccagggaaggggctggagtgggtctcaatgattactggtactggatataacacatattatgcagactccgtgaagggccggttcaccgtctcgagagacaattccaaaaacacagtgtttctgcagatgaaccgcctgagagccgaggacgcggccgtgtattactgtgcgaaagatgcgggagggaggttcggggagctgttaagggatcactactttgactcctggggccagggaacccgggtcaccgtctccccag

SEQ ID NO: 173 - DNA, 361 bp, synthetic construct
  misc_feature 1..361: note = Description of sequence: Sequence Name: 71282-16
  source 1..361: mol_type = other DNA
caagtccagcttgtgcagtctggggctgaggtgaagaagactggggcctcactgaaggtttcctgcaaggcttctggatacagcataacgagccaaggcatgcactgggtgcgccaggcccccggacaaaggctggagtggatgggacggatcagccgtgacaatgacaacacagtaaaatcacggaaactgcaagacagactcagcattaccaaggacacatccgcgaacacagtctacatggagttgagcagcctgacatcggaagacacggctgtctattactgtgccagagattcgtggaagccgcaagggggcattgacttctggggcccggggaccctggtcaccgtctcctcag

SEQ ID NO: 174 - DNA, 361 bp, synthetic construct
  misc_feature 1..361: note = Description of sequence: Sequence Name: 71282-17
  source 1..361: mol_type = other DNA
caggtgaagctggtacaatctggggctgaggtgaagaggcctggggcctcagttaaggtttcctgcaccgcatctggatacaccttcaccgactacttcatgcactgggtgcggcaggcccccggacgagggcttgagtggatgggcgtagttcagtgtggtggtaatttcatcgggtacgcacagaagtttcagggcagagtcaccatgaccagggacacgaccacgaatacactctacatggagatgaacagcctgacatctgaggacacggccgtctattattgcgcgagagaagtagtgactggagtgggcgctaaggcctactggggccagggaaccctggtcaccgtctcctcag

SEQ ID NO: 175 - DNA, 370 bp, synthetic construct
  misc_feature 1..370: note = Description of sequence: Sequence Name: 71282-18
  source 1..370: mol_type = other DNA
caggtgcagctgcaggagtcgggcccaggactggtgaagccttcggagaccctgtccctcacctgcactgtctctggtgactccatgagtcgttactactggagctggatccggcagcccccagggaagggactggagtggattgggtatatctattacagtgggagcaccaactacaacccctccctcaagagtcgagtcaccatatcagtagacacgtccaagaaccagttctccctgaagctgagctctgtgaccgccgcagacacggccgtgtattattgtgcgaggacgtattactatgataggagtggtccgactcatgcttttgatatctggggccaagggacaatggtcaccgtctcttcag

SEQ ID NO: 176 - DNA, 394 bp, synthetic construct
  misc_feature 1..394: note = Description of sequence: Sequence Name: 71282-19
  source 1..394: mol_type = other DNA
gatgtgcatctggtggagtctgggggaggcttggtcccgccgggggggtccctgagactctcctgtacaccctctggattcacttttagtaactattggatgacctgggtccgccaggctccagggaaggggctggagtgggtggccaatataaagcaagatagaagtgagaagtattatgtggactctgtgaggggccgattcaccatctccagagacaacgccaagaattcattgtatttgcaaatgaacagcctgagagccgaggacacggccgtgtatttctgtgcgcgaggggtcgcaatggtggatactgttctcacgattactccagcgcggggaaactggcacttcgatctctggggccgtggcaccttggtcactgtcgtgccag

SEQ ID NO: 177 - DNA, 391 bp, synthetic construct
  misc_feature 1..391: note = Description of sequence: Sequence Name: 71282-20
  source 1..391: mol_type = other DNA
cagatcaccttgaaggagtctggtcctacactggtgaaacccacacagaccctcacgctgacctgcaccttctctgggttctcactcaacactagtggagtgggtgtgggctggatccgtcagcccccaggaaaggccctggagtggcttgcactcatttattggaatgatgatgagcgctacagcccatctctgaagagcaggctcaccatcaccaaggacacctccaaaaaccaggtggtccttacaatgaccaacatggaccctgtggacacagccacttactactgtggacacagacggcaatttcactataatagcattggttcttactacgaagaatactactttgactactggggccagggaaccctggtcaccgtctcctcag

SEQ ID NO: 178 - protein, 127 aa, synthetic construct
  REGION 1..127: note = Description of sequence: Sequence Name: 71281-1
EVQLLESGGGLVQPGGSLRLSCAASEFTFSTYAMTWVRQAPGKGLEWVSVISGSGGSTYYADSVKGRFTISRDNSNNTLYLQMNSLRVEDTAVYYCAKTIPYYDDLTGRTYDWFDPWGQGTLVTVSS

SEQ ID NO: 179 - protein, 122 aa, synthetic construct
  REGION 1..122: note = Description of sequence: Sequence Name: 71281-2
QVQVVQSGAEVRKPGASVKISCKTSGFTFTSYVMYWVRQAPGQGLEWMGLINPNTLITRNAQGFEGRLTMTRDTSTSTVYMELNRLTSDDTAVYYCARGMMGVTGADYFGFWGRGVPVTVSS

SEQ ID NO: 180 - protein, 119 aa, synthetic construct
  REGION 1..119: note = Description of sequence: Sequence Name: 71281-3
EVQLVESGGDLVQPGGSLRLSCAASGLTFSIYWMSWVRQAPGKGLEWVANIKQDGGEKYYVDSVKGRFTISRDNAKKLVYLQMNSLRAEDTAVYYCVSCSSSSWEFDYWGQGTLVTVSS

SEQ ID NO: 181 - protein, 134 aa, synthetic construct
  REGION 1..134: note = Description of sequence: Sequence Name: 71281-4
EVQLVESGGGLVQPGGSLRLSCSASGFTFSNYAMNWVRQAPGKGLEFVSGINPIVDNGGSTYYADSVKGRFTISRDNSKNTLYLQMSSLRAEDTAVYYCVKTTGAWGDVFDYDSGTYLYHFDYWGQGTLVTVSS

SEQ ID NO: 182 - protein, 125 aa, synthetic construct
  REGION 1..125: note = Description of sequence: Sequence Name: 71281-5
EVQLLESGGGLVQPGGSLRLSCAASGFTFNNYAMSWVRQAPGMGLEWVSGVSASGGTTYYADSVKGRFTISRDNSKNTLFLQMNSLRADDTAVYYCANLISLVDDFWSDYYDDYWGQGTLVTVSS

SEQ ID NO: 183 - protein, 121 aa, synthetic construct
  REGION 1..121: note = Description of sequence: Sequence Name: 71281-6
QVHLVESGGGVVQPGRSLRLSCAASGFTFSTYGMHWVRQAPGKGLEWVALISFDGSIKYYAESVKGRFTISRDNSKNTLYVQMDSLRTEDTAVYYCARSPGTAWGGYMDVWGQGTTVTVSS

SEQ ID NO: 184 - protein, 119 aa, synthetic construct
  REGION 1..119: note = Description of sequence: Sequence Name: 71281-7
DLQLLESGGGLVQPGGSLRLSCAASGFIFSHYDMSWVRQAPGKGLEWVSSMSGSGGAIYYAASVKGRFIISRDNSRDTLYLQMTSLRAEDTALYYCARQKQQYFYFDYWGQGTLVTVSS

SEQ ID NO: 185 - protein, 124 aa, synthetic construct
  REGION 1..124: note = Description of sequence: Sequence Name: 71281-8
QLQLQESGPGLVKPSETLSLTCTVSGGSISSSSYYWGWIRQPPGKGLEWIGNIYYSGSTYYNPSLRSRVTISVDTFKSHFSLNLNSVTAADTSIYYCARLKVGPAPGTRVFDYWGQGTLVSVSS

SEQ ID NO: 186 - protein, 121 aa, synthetic construct
  REGION 1..121: note = Description of sequence: Sequence Name: 71281-9
EVQLVQSGAEEKKPGESLKISCKGSEFNFVNYWVAWVRQMPGKGLEWMGIIFPGDSGTRYSPSFQGQVTISADKSISTAYLQWSSLKASDTAIYYCATPSSGRTGEGMDVWGQGTTVTVSS

SEQ ID NO: 187 - protein, 117 aa, synthetic construct
  REGION 1..117: note = Description of sequence: Sequence Name: 71281-10
EVQVVESGGGLVQPGGSLRLSCAASGFIFSDSWMGWVRQAPGKGLEWVANIKSDGSTKYYVGSVRGRFTISRDNAQNSVYLQLNSLRAEDTATYYCARHGDYAFDSWGQGTLVTVSS

SEQ ID NO: 188 - protein, 120 aa, synthetic construct
  REGION 1..120: note = Description of sequence: Sequence Name: 71281-11
QVQLVQSGAEVKKPGSSVKVSCKASGGTLSTYTVSWVRQAPGQGLEWMGGIIPVFGTSDYAKKFQGRVSITADEPTNTAYMELNSLRSEDTAFYFCARGQPYSISPFESWGQGTLVTVSS

SEQ ID NO: 189 - protein, 128 aa, synthetic construct
  REGION 1..128: note = Description of sequence: Sequence Name: 71281-12
QLQLQESGPGLVKPSETLSLTCSVSGDSISSSNYYWGWIRQPPGKGLEWIGTIYYSGTTYYNPSLKSRVTISVDTSKNQFSLNLSSVTAADTAVYYCARHDSAALAGDWSSGWPFDYWGQGTLVIVSS

SEQ ID NO: 190 - protein, 126 aa, synthetic construct
  REGION 1..126: note = Description of sequence: Sequence Name: 71281-13
QKQLVQSGAEVKKPGASVKVSCKASGYSFTSYGITWVRQAPGQGLEWVGWISGHNGNTDYAQKFQDRVTLTTDTSTNTAYLELRSLKSDDTAVYYCARDPRIVVMVAANRRRIDYWGQGTLVAVSS

SEQ ID NO: 191 - protein, 125 aa, synthetic construct
  REGION 1..125: note = Description of sequence: Sequence Name: 71281-14
QVQLVESGGGLVKPGGSLRLSCAASGFTFTDYYMTWMRQAPGKGLEWVSYISSSGDYTNYADSVKGRFTISRDNARNSLYLQMNSLRAEDTAVYFCARDTVPNCGTKCYLTFDYWGQGTLVTVSS

SEQ ID NO: 192 - protein, 128 aa, synthetic construct
  REGION 1..128: note = Description of sequence: Sequence Name: 71281-15
EVQLVESGGGLVRPGESLRLSCVAPDSTFINAWMNWVRQAPGQGLEWVGRIRSKRDGGTTDHAAPVRGRFRVSRDDSKNTVYLQMNSLKVEDTGVYYCASHLSGSGTYHPPQYGLDVWGLGTTVTVSS

SEQ ID NO: 193 - protein, 120 aa, synthetic construct
  REGION 1..120: note = Description of sequence: Sequence Name: 71281-16
EVQLVESGGGLVQPGGSLKLSCAASGFTFSGSAMHWVRQASGKGLEWVGRIRSKANSYATAYAASVKGRFTISRDDSKNTAYLQMNSLKTEDTAVYYCTRIQRTEGFDYWGQGTLVTVSS

SEQ ID NO: 194 - protein, 125 aa, synthetic construct
  REGION 1..125: note = Description of sequence: Sequence Name: 71281-17
EVQLVESGGGLVQPGGSRRLSCAASGFTFSAYWMYWVRQAPGKGLVWVSRINSDGSSASYADSVKGRFTISRDNAKNTLYLQMNSLRVEDTAVYYCARDGLISVSGSYYGLPGVWGQGTTVTVSS

SEQ ID NO: 195 - protein, 113 aa, synthetic construct
  REGION 1..113: note = Description of sequence: Sequence Name: 71281-18
EVQLVETGGGLIQPGGSLRLSCVVSGFTVGSNYMSWVRQAPGKRLEWVSVLYAGGSTYYAESVKGRFTVSRDESRNTLFLQMHSLRVEDTAVYYCARRDGSHWGQGTSVTVSS

SEQ ID NO: 196 - protein, 130 aa, synthetic construct
  REGION 1..130: note = Description of sequence: Sequence Name: 71281-19
QVQLVQSGAEVKKPGASVKVSCKASGYTFTGYYMHWVRQAPGQGLEWMGWINPNSGGTNYAQKFQGRVTMTRDTSISTAYMELSRLRSDDTAVYYCARDWDGDDSSVYYRVYNYYGMDVWGQGSTVTVSS

SEQ ID NO: 197 - protein, 122 aa, synthetic construct
  REGION 1..122: note = Description of sequence: Sequence Name: 71281-20
AVQLVESGGGLVQPGGSLRLSCAASGFPFTTYWMHWVRQAPGKGPVWVSGINLDGSVTTYADSVKGRFTISRDNAKNMLYLQMNSLRAEDTGVYYCARQFLRGVVINWFGPWGQGTLVTVSS

SEQ ID NO: 198 - protein, 127 aa, synthetic construct
  REGION 1..127: note = Description of sequence: Sequence Name: 71281-21
QLQLQESGPGLVKPSETLSLTCTVSGGSIRSSDYYWGWIRQPPGKGLEWIGTIYYSGTRYYNPSPSLKGRITISADTSKNQFSLKLSSVTAADTAVYYCARQRKAARPIYYYYMDVWGKGTTVTVSS

SEQ ID NO: 199 - protein, 124 aa, synthetic construct
  REGION 1..124: note = Description of sequence: Sequence Name: 71281-22
QVQLQESGPGLVKPSQTLSLTCTVSGDSISSGGYYWSWIRQHPGKGLEWIGYIYYGGNTYYNPSLKSRATISVDTSKNHFSLKLRSVTAADTAVYYCARALGDLPYYYYGLDVWGQGTTVTVSS

SEQ ID NO: 200 - protein, 122 aa, synthetic construct
  REGION 1..122: note = Description of sequence: Sequence Name: 71281-23
QVQLQESGPGLVKPSGTLSLTCAVSGDSISSSDWWNWVRQSPGKGLEWIGEIYHGGHTIYNPSLKSRVTMSVDKSNNQFSLNLTSMTAADTAIYYCARDHSGPGNSWSFDYWGQGILVTVSS

SEQ ID NO: 201 - protein, 119 aa, synthetic construct
  REGION 1..119: note = Description of sequence: Sequence Name: 71281-24
EVQLVQSGAEVKKPGESLRISCKDSGYSFTTYWISWVRQMPGKGLEWMGRIDPSDSYTNYSPSFQGHVTISADKSISTAYLQWSSLKASDTAMYYCARHGANPTAFDIWGQGTMVTVSS

SEQ ID NO: 202 - protein, 125 aa, synthetic construct
  REGION 1..125: note = Description of sequence: Sequence Name: 71281-25
EVQLLESGGGLVQPGGSLRLSCAASGFTFSSYAMSWVRQAPGKGLEWVSVISGSGGTTLYADSVKGRFTISRDNSKNTLYLQMKSLRAEDTAVYYCARTRDIVLLPTVVAGDSDWGQGTLVTVSS

SEQ ID NO: 203 - protein, 121 aa, synthetic construct
  REGION 1..121: note = Description of sequence: Sequence Name: 71281-26
EVQLLESGGGVVQPGGSLRLSCAASGFAFSNYAMTWVRQAPGKGLEWVATISYGGDNTYYADSVKGRFTISRDNSMNTLYLQMNSLRAEDTAVYYCVSPGDNVPDWYFDLWGRGTLVTVSS

SEQ ID NO: 204 - protein, 126 aa, synthetic construct
  REGION 1..126: note = Description of sequence: Sequence Name: 71281-27
QLQLQESGPGLVKPSETLSLTCTVSGGSISSSSYYWGWIRQAPGKGLEWIGNIYYRGSTYYNPSLKSRVTISVDTSKSQFSLELSSVTAADTAVYYCARRGLLLLAVAGSGAFGIWGQGTMVTVSS

SEQ ID NO: 205 - protein, 128 aa, synthetic construct
  REGION 1..128: note = Description of sequence: Sequence Name: 71281-28
QVQLVQSGAEVKKPGASVKVSCQASGYSFNAYYMHWVRQAPGQGPEWMGRINPHSGDIHYAQKFQDRVTMTRDTSISTVYMELSRLRSDDTAVYYCARDAKRFLEWSEIYLYWYMDVWGKGTTVIVSS

SEQ ID NO: 206 - protein, 124 aa, synthetic construct
  REGION 1..124: note = Description of sequence: Sequence Name: 71281-29
EVQLVQSGAEVKKPGESLRISCKGSGYSFTSYWISWMRQMPGKGLEWMGRIDPTDSYTNYSPSFQGHVTISADKSISTAYLQWSSLKASDTAMYYCAKDYGDYDLGYYYAMDVWGQGTTVTVSS

SEQ ID NO: 207 - protein, 122 aa, synthetic construct
  REGION 1..122: note = Description of sequence: Sequence Name: 71281-30
QVQVVESGGGLVKPGGSLRLSCVASGFAFSDDYMSWVRQAPGKGLEWISYIDGGDGTYKNYAVSVKGRFTISRDNDNNSVHLQLNGLRVDDTAVYYCVRGLGVGATGHPRYWGQGTLVTVSS

SEQ ID NO: 208 - protein, 128 aa, synthetic construct
  REGION 1..128: note = Description of sequence: Sequence Name: 71281-31
QVQLVESGGGVVQPGRSLRLSCAASGFTFSRYGMHWVRQAPGKGLEWVAFISYDGDNKYYADSVKGRFTISRDNSKNTLYLQMDSLRTEDTAVYYCAKDPTARLGYCRGGSCYLADYWGQGTLVTVSS

SEQ ID NO: 209 - protein, 119 aa, synthetic construct
  REGION 1..119: note = Description of sequence: Sequence Name: 71281-32
QITLKESGPTLVKPTQTLTLTCTFSGFSLSTSGVGVGWIRQPPGKALEWLAVTYWDGDTRYSPSLKSRLTITKDTSKNLVVLTMTNMDPVDTATYYCVHHTITMIVGYWGQGALVTVSS

SEQ ID NO: 210 - protein, 117 aa, synthetic construct
  REGION 1..117: note = Description of sequence: Sequence Name: 71281-33
DVHLVESGGGLVQPGGSLRLSCAASEIIVSVNYMNWVRQAPGKGLEWVSVIYSGGSTFYADSVKGRFTISRDNSKNTLYLQMNSLRIEDTAVYYCARGFGDHYFNSWGQGTLVTVSS

SEQ ID NO: 211 - protein, 122 aa, synthetic construct
  REGION 1..122: note = Description of sequence: Sequence Name: 71281-34
VQLVESGGGVVQPGASLRLSCAASGGFNFSYSAMHWVRQAPGKGLEWVAVISYDGTSKYQRDSLKDRLTVSRDNSRSTVFLEMNSLRAEDTGVYYCARDYYARSWDGYFDHWGQGTLVTVSS

SEQ ID NO: 212 - protein, 117 aa, synthetic construct
  REGION 1..117: note = Description of sequence: Sequence Name: 71281-35
EVQLVESGGGLIQPGGSLRLSCAASGFTVSRNYMSWVRQAPGKGLEWVSLIYSGGSTYYADSVKGRFTISRDNSKNTLYLQMISLRAEDTAVYYCARETPGYGDEAWGQGTLVTVSS

SEQ ID NO: 213 - protein, 123 aa, synthetic construct
  REGION 1..123: note = Description of sequence: Sequence Name: 71281-36
QMQLVQSGPEVKKPGTSVKIPCRASGFTFFTSSVQWVRQARGQRLEWIGWIVVGSGKTIYAQRFQERVTITRDMSTNTAYMELSSLRSEDTAVYYCAAPNCTGGSCFDGFNLWGQGTQVTVSS

SEQ ID NO: 214 - protein, 119 aa, synthetic construct
  REGION 1..119: note = Description of sequence: Sequence Name: 71281-37
EVPLVESGGGLIQPGGSLRLSCAASGFTVSSNYMYWVRQAPGKGLEWVSLIYPGGTTYYADSVKGRFTISRDNSKNTLWLQMNSLRAEDTAVYFCARGPYCRGAGCRPWGQGTLVTVSS

SEQ ID NO: 215 - protein, 132 aa, synthetic construct
  REGION 1..132: note = Description of sequence: Sequence Name: 71281-38
QVQLVQSGSELKKPGASVKVSCKASGYTFTRYAVNWVRQAPGQGLEWMGWINTNTGNPTYAQDFTGRFVFSLDTSVNTAYLQISSLKAEDTAVYYCASVPHPHCSSTSCYAGDYYYFGVDVWGQGTTVTVSS

SEQ ID NO: 216 - protein, 118 aa, synthetic construct
  REGION 1..118: note = Description of sequence: Sequence Name: 71281-39
QVQLVESGGGVVQPGGSLRLSCAASGFTFSTYAIHWVRQAPGKGLEWVAAISYDGYNKQYADSVKGRFTISRDNSNNTLYLQMFSLRTEDTAVYYCARDTTPYGMDVWGQGTTVTVSS

SEQ ID NO: 217 - protein, 124 aa, synthetic construct
  REGION 1..124: note = Description of sequence: Sequence Name: 71282-1
EVQLLESGGGLVQPGGSLRLSCAASGFTFSSYAMSWVRQAPGKGLGWVSAISGGGGSTYYADSVKGRFTISRDNSKNTLYLQMNSLRAEDTAVYYCAKYYYDISAYYIPNFDYWGQGTLVTVSS

SEQ ID NO: 218 - protein, 121 aa, synthetic construct
  REGION 1..121: note = Description of sequence: Sequence Name: 71282-2
EVQLLESGGGLVQPGGSLRLSCVASGFTFSSYPMSWVRQAPGKGLEWVSGITATTYYADSVKGRFTISRDNSRDTLYLQMNSLRAEDTAVYYCAKHLKPCSDSCYATLDYWGQGTLVTVSS

SEQ ID NO: 219 - protein, 127 aa, synthetic construct
  REGION 1..127: note = Description of sequence: Sequence Name: 71282-3
QLQLQESGPGLVKSSETLSLTCSVSGGSIRTTSYYWAWVRQPPGKGLEWIGSMYYTGRTSYAESTYYNPSLGNRVTISVDTSKQFSLKLSSVTAADTAVFYCARHSRSRGGYTYDYWGQGTLVTVSS

SEQ ID NO: 220 - protein, 122 aa, synthetic construct
  REGION 1..122: note = Description of sequence: Sequence Name: 71282-4
QVQLVQSGAEVKKPGSSVKVSCKASGGTFSTSAISWVRQAPGQGLEWMGGIIPFFGTPNYAQKFQGRVTITADESTSTVYMDLSSLRSEDTAVYYCANDYTSSGWYTPLDYWGQGTLVTVSS

SEQ ID NO: 221 - protein, 123 aa, synthetic construct
  REGION 1..123: note = Description of sequence: Sequence Name: 71282-5
EVQVLESGGGLVQPGGSLRLSCAASGFTFSSYAMTWVRQAPGKGLEWVSTISGDGASTFYADSVRGRFTLSRDNSKNTLYLQMNSLRAEDTAVYYCAKDLEDYGDFAACFDSWGQGRLVTVSS

SEQ ID NO: 222 - protein, 126 aa, synthetic construct
  REGION 1..126: note = Description of sequence: Sequence Name: 71282-6
EVQLVESGGGLVQPGGSLRLSCAASGFTFSSYSMKWVRQAPGKGLEWISDISSSSSTIYYADSVKGRFTIFRDNAKNSLYLQMNSLRAEDTAVYYCARDGDYYDSSGHSREAFDIWGQGTMVTVSS

SEQ ID NO: 223 - protein, 121 aa, synthetic construct
  REGION 1..121: note = Description of sequence: Sequence Name: 71282-7
QVQLVESGGGVVQPGRSLRLSCAASGFTFRSHSIHWVRQAPGKGLEWVAVISYDGYNKYYADSVKGRFTMSRDNSQNTLYLQMNSLRVEDTAVYYCARAGGGTYYSWFDPWGQGTLVTVSS

SEQ ID NO: 224 - protein, 125 aa, synthetic construct
  REGION 1..125: note = Description of sequence: Sequence Name: 71282-8
EVQLVESGGGLVQPGGSLRLSCAASGFSLSSYWMSWVRQAPGKGLEWVANINRDGSEKYSVDSVKGRFTISRDNTKNSLYLHMNSLRVEDTAVYYCARDPTSHWLVGEPPYFDYWGQGTLVIVSS

SEQ ID NO: 225 - protein, 120 aa, synthetic construct
  REGION 1..120: note = Description of sequence: Sequence Name: 71282-9
EVQLVESGGGLVKPGGSLRLSCAASGFTFSSYNMHWVRQAPGKGLEWVSFISTSSDYIYYADSVKGRFTISRDNAKNSLYLQMNSLRAEDTAVYYCARDVIGEWEPHAYWGQGTLVTVSS

SEQ ID NO: 226 - protein, 121 aa, synthetic construct
  REGION 1..121: note = Description of sequence: Sequence Name: 71282-10
QVQLVESGGGVVQPGRSLRLSCVASGFTFYTYAMHWVRQAPGKGLEWVALISYDGINKYYTDSVRGRFTISRDNSKNTLYLQMNGLRGDDTAVYYCARAYGGSYSGAFDIWGQGTIVTVSS

SEQ ID NO: 227 - protein, 121 aa, synthetic construct
  REGION 1..121: note = Description of sequence: Sequence Name: 71282-11
EVQLVESGGGLVQPGGSLRLSCAASGFTVSSNYMSWVRQAPGKGLEWVSVIYSGGSTYYADSVKGRFTISRHNSKNTLYLQMNSLRAEDTAVYYCARDRGGRSFLDGMDVWGQGTTVTVSS

SEQ ID NO: 228 - protein, 128 aa, synthetic construct
  REGION 1..128: note = Description of sequence: Sequence Name: 71282-12
QVQLVQSGAEVKKPGSSVKVSCRASGGTFSSYAISWVRQAPGQGLEWMGGIIPIFGTANYAQKFQGRVTITADESTSTAYMEVSSLRSEDTAVYYCARTVTPIRYCTSTSCFTRLHYWGQGTLVTVSS

SEQ ID NO: 229 - protein, 122 aa, synthetic construct
  REGION 1..122: note = Description of sequence: Sequence Name: 71282-13
EVQLVESGGGLVHPGGSLRLSCAASGFTVSSNYMNWVRQAPGKGLEWVSVIYTGGSTYYAGSVKGRFTISRDNSENTLYLQMNGLRAEDTAVYYCARDPLVGTTRLHAFDIWGQGTMVTVAP

SEQ ID NO: 230 - protein, 126 aa, synthetic construct
  REGION 1..126: note = Description of sequence: Sequence Name: 71282-14
QVQLVESGGGVVQPGRSLRLSCAASGFTFRSYGMHWVRQAPGKGLEWVAVISYDGSNKYYADSVKGRFTISRDNSKNTLYLQMNSLRAEDTAVYYCAAVVDIVVVPSIILLPPDYWGQGSLVTVAS

SEQ ID NO: 231 - protein, 126 aa, synthetic construct
  REGION 1..126: note = Description of sequence: Sequence Name: 71282-15
EVQLLESGGGLVQPGGSLRLSCVASGFTFSNYAMSWVRQAPGKGLEWVSMITGTGYNTYYADSVKGRFTVSRDNSKNTVFLQMNRLRAEDAAVYYCAKDAGGRFGELLRDHYFDSWGQGTRVTVSP

SEQ ID NO: 232 - protein, 120 aa, synthetic construct
  REGION 1..120: note = Description of sequence: Sequence Name: 71282-16
QVQLVQSGAEVKKTGASLKVSCKASGYSITSQGMHWVRQAPGQRLEWMGRISRDNDNTVKSRKLQDRLSITKDTSANTVYMELSSLTSEDTAVYYCARDSWKPQGGIDFWGPGTLVTVSS

SEQ ID NO: 233 - protein, 120 aa, synthetic construct
  REGION 1..120: note = Description of sequence: Sequence Name: 71282-17
QVKLVQSGAEVKRPGASVKVSCTASGYTFTDYFMHWVRQAPGRGLEWMGVVQCGGNFIGYAQKFQGRVTMTRDTTTNTLYMEMNSLTSEDTAVYYCAREVVTGVGAKAYWGQGTLVTVSS

SEQ ID NO: 234 - protein, 123 aa, synthetic construct
  REGION 1..123: note = Description of sequence: Sequence Name: 71282-18
QVQLQESGPGLVKPSETLSLTCTVSGDSMSRYYWSWIRQPPGKGLEWIGYIYYSGSTNYNPSLKSRVTISVDTSKNQFSLKLSSVTAADTAVYYCARTYYYDRSGPTHAFDIWGQGTMVTVSS

SEQ ID NO: 235 - protein, 131 aa, synthetic construct
  REGION 1..131: note = Description of sequence: Sequence Name: 71282-19
DVHLVESGGGLVPPGGSLRLSCTPSGFTFSNYWMTWVRQAPGKGLEWVANIKQDRSEKYYVDSVRGRFTISRDNAKNSLYLQMNSLRAEDTAVYFCARGVAMVDTVLTITPARGNWHFDLWGRGTLVTVVP

SEQ ID NO: 236 - protein, 130 aa, synthetic construct
  REGION 1..130: note = Description of sequence: Sequence Name: 71282-20
QITLKESGPTLVKPTQTLTLTCTFSGFSLNTSGVGVGWIRQPPGKALEWLALIYWNDDERYSPSLKSRLTITKDTSKNQVVLTMTNMDPVDTATYYCGHRRQFHYNSIGSYYEEYYFDYWGQGTLVTVSS

SEQ ID NO: 237 - DNA, 382 bp, synthetic construct; identical to SEQ ID NO: 119
  misc_feature 1..382: note = Description of sequence: Sequence Name: 71281-1
  source 1..382: mol_type = other DNA

SEQ ID NO: 238 - DNA, 367 bp, synthetic construct; identical to SEQ ID NO: 120
  misc_feature 1..367: note = Description of sequence: Sequence Name: 71281-2
  source 1..367: mol_type = other DNA

SEQ ID NO: 239 - DNA, 358 bp, synthetic construct; identical to SEQ ID NO: 121
  misc_feature 1..358: note = Description of sequence: Sequence Name: 71281-3
  source 1..358: mol_type = other DNA

SEQ ID NO: 240 - DNA, 394 bp, synthetic construct; identical to SEQ ID NO: 122
  misc_feature 1..394: note = Description of sequence: Sequence Name: 71281-4
  source 1..394: mol_type = other DNA

SEQ ID NO: 241 - DNA, 376 bp, synthetic construct; identical to SEQ ID NO: 123
  misc_feature 1..376: note = Description of sequence: Sequence Name: 71281-5
  source 1..376: mol_type = other DNA

SEQ ID NO: 242 - DNA, 364 bp, synthetic construct; identical to SEQ ID NO: 124
  misc_feature 1..364: note = Description of sequence: Sequence Name: 71281-6
  source 1..364: mol_type = other DNA

SEQ ID NO: 243 - DNA, 358 bp, synthetic construct; identical to SEQ ID NO: 125
  misc_feature 1..358: note = Description of sequence: Sequence Name: 71281-7
  source 1..358: mol_type = other DNA

SEQ ID NO: 244 - DNA, 373 bp, synthetic construct; identical to SEQ ID NO: 126
  misc_feature 1..373: note = Description of sequence: Sequence Name: 71281-8
  source 1..373: mol_type = other DNA

SEQ ID NO: 245 - DNA, 364 bp, synthetic construct; identical to SEQ ID NO: 127
  misc_feature 1..364: note = Description of sequence: Sequence Name: 71281-9
  source 1..364: mol_type = other DNA

SEQ ID NO: 246 - DNA, 352 bp, synthetic construct; identical to SEQ ID NO: 128
  misc_feature 1..352: note = Description of sequence: Sequence Name: 71281-10
  source 1..352: mol_type = other DNA

SEQ ID NO: 247 - DNA, 361 bp, synthetic construct; identical to SEQ ID NO: 129
  misc_feature 1..361: note = Description of sequence: Sequence Name: 71281-11
  source 1..361: mol_type = other DNA

SEQ ID NO: 248 - DNA, 385 bp, synthetic construct; identical to SEQ ID NO: 130
  misc_feature 1..385: note = Description of sequence: Sequence Name: 71281-12
  source 1..385: mol_type = other DNA

SEQ ID NO: 249 - DNA, 379 bp, synthetic construct; identical to SEQ ID NO: 131
  misc_feature 1..379: note = Description of sequence: Sequence Name: 71281-13
  source 1..379: mol_type = other DNA

SEQ ID NO: 250 - DNA, 376 bp, synthetic construct; identical to SEQ ID NO: 132
  misc_feature 1..376: note = Description of sequence: Sequence Name: 71281-14
  source 1..376: mol_type = other DNA

SEQ ID NO: 251 - DNA, 384 bp, synthetic construct; identical to SEQ ID NO: 133
  misc_feature 1..384: note = Description of sequence: Sequence Name: 71281-15
  source 1..384: mol_type = other DNA

SEQ ID NO: 252 - DNA, 361 bp, synthetic construct; identical to SEQ ID NO: 134
  misc_feature 1..361: note = Description of sequence: Sequence Name: 71281-16
  source 1..361: mol_type = other DNA

SEQ ID NO: 253 - DNA, 376 bp, synthetic construct; identical to SEQ ID NO: 135
  misc_feature 1..376: note = Description of sequence: Sequence Name: 71281-17
  source 1..376: mol_type = other DNA

SEQ ID NO: 254 - DNA, 340 bp, synthetic construct; identical to SEQ ID NO: 136
  misc_feature 1..340: note = Description of sequence: Sequence Name: 71281-18
  source 1..340: mol_type = other DNA

SEQ ID NO: 255 - DNA, 390 bp, synthetic construct; identical to SEQ ID NO: 137
  misc_feature 1..390: note = Description of sequence: Sequence Name: 71281-19
  source 1..390: mol_type = other DNA

SEQ ID NO: 256 - DNA, 367 bp, synthetic construct; identical to SEQ ID NO: 138
  misc_feature 1..367: note = Description of sequence: Sequence Name: 71281-20
  source 1..367: mol_type = other DNA

SEQ ID NO: 257 - DNA, 375 bp, synthetic construct; identical to SEQ ID NO: 139
  misc_feature 1..375: note = Description of sequence: Sequence Name: 71281-21
  source 1..375: mol_type = other DNA

SEQ ID NO: 258 - DNA, 372 bp, synthetic construct; identical to SEQ ID NO: 140
  misc_feature 1..372: note = Description of sequence: Sequence Name: 71281-22
  source 1..372: mol_type = other DNA

SEQ ID NO: 259 - DNA, 367 bp, synthetic construct; identical to SEQ ID NO: 141
  misc_feature 1..367: note = Description of sequence: Sequence Name: 71281-23
  source 1..367: mol_type = other DNA

SEQ ID NO: 260 - DNA, 358 bp, synthetic construct; identical to SEQ ID NO: 142
  misc_feature 1..358: note = Description of sequence: Sequence Name: 71281-24
  source 1..358: mol_type = other DNA

SEQ ID NO: 261 - DNA, 376 bp, synthetic construct; identical to SEQ ID NO: 143
  misc_feature 1..376: note = Description of sequence: Sequence Name: 71281-25
  source 1..376: mol_type = other DNA

SEQ ID NO: 262 - DNA, 364 bp, synthetic construct; identical to SEQ ID NO: 144
  misc_feature 1..364: note = Description of sequence: Sequence Name: 71281-26
  source 1..364: mol_type = other DNA

SEQ ID NO: 263 - DNA, 379 bp, synthetic construct; identical to SEQ ID NO: 145
  misc_feature 1..379: note = Description of sequence: Sequence Name: 71281-27
  source 1..379: mol_type = other DNA

SEQ ID NO: 264 - DNA, 384 bp, synthetic construct; identical to SEQ ID NO: 146
  misc_feature 1..384: note = Description of sequence: Sequence Name: 71281-28
  source 1..384: mol_type = other DNA

SEQ ID NO: 265 - DNA, 372 bp, synthetic construct; identical to SEQ ID NO: 147
  misc_feature 1..372: note = Description of sequence: Sequence Name: 71281-29
  source 1..372: mol_type = other DNA

SEQ ID NO: 266 - DNA, 364 bp, synthetic construct; identical to SEQ ID NO: 148
  misc_feature 1..364: note = Description of sequence: Sequence Name: 71281-30
  source 1..364: mol_type = other DNA

SEQ ID NO: 267 - DNA, 385 bp, synthetic construct; identical to SEQ ID NO: 149
  misc_feature 1..385: note = Description of sequence: Sequence Name: 71281-31
  source 1..385: mol_type = other DNA

SEQ ID NO: 268 - DNA, 358 bp, synthetic construct; identical to SEQ ID NO: 150
  misc_feature 1..358: note = Description of sequence: Sequence Name: 71281-32
  source 1..358: mol_type = other DNA

SEQ ID NO: 269 - DNA, 352 bp, synthetic construct; identical to SEQ ID NO: 151
  misc_feature 1..352: note = Description of sequence: Sequence Name: 71281-33
  source 1..352: mol_type = other DNA

SEQ ID NO: 270 - DNA, 367 bp, synthetic construct; identical to SEQ ID NO: 152
  misc_feature 1..367: note = Description of sequence: Sequence Name: 71281-34
  source 1..367: mol_type = other DNA

SEQ ID NO: 271 - DNA, 352 bp, synthetic construct; identical to SEQ ID NO: 153
  misc_feature 1..352: note = Description of sequence: Sequence Name: 71281-35
  source 1..352: mol_type = other DNA

SEQ ID NO: 272 - DNA, 370 bp, synthetic construct; identical to SEQ ID NO: 154
  misc_feature 1..370: note = Description of sequence: Sequence Name: 71281-36
  source 1..370: mol_type = other DNA

SEQ ID NO: 273 - DNA, 358 bp, synthetic construct; identical to SEQ ID NO: 155
  misc_feature 1..358: note = Description of sequence: Sequence Name: 71281-37
  source 1..358: mol_type = other DNA

SEQ ID NO: 274 - DNA, 396 bp, synthetic construct; identical to SEQ ID NO: 156
  misc_feature 1..396: note = Description of sequence: Sequence Name: 71281-38
  source 1..396: mol_type = other DNA

SEQ ID NO: 275 - DNA, 354 bp, synthetic construct; identical to SEQ ID NO: 157
  misc_feature 1..354: note = Description of sequence: Sequence Name: 71281-39
  source 1..354: mol_type = other DNA

SEQ ID NO: 276 - DNA, 373 bp, synthetic construct; identical to SEQ ID NO: 158
  misc_feature 1..373: note = Description of sequence: Sequence Name: 71282-1
  source 1..373: mol_type = other DNA

SEQ ID NO: 277 - DNA, 364 bp, synthetic construct; identical to SEQ ID NO: 159
  misc_feature 1..364: note = Description of sequence: Sequence Name: 71282-2
  source 1..364: mol_type = other DNA

SEQ ID NO: 278 - DNA, 364 bp, synthetic construct; identical to SEQ ID NO: 160
  misc_feature 1..364: note = Description of sequence: Sequence Name: 71282-3
  source 1..364: mol_type = other DNA

SEQ ID NO: 279 - DNA, 367 bp, synthetic construct; identical to SEQ ID NO: 161
  misc_feature 1..367: note = Description of sequence: Sequence Name: 71282-4
  source 1..367: mol_type = other DNA

SEQ ID NO: 280 - DNA, 370 bp, synthetic construct; identical to SEQ ID NO: 162
  misc_feature 1..370: note = Description of sequence: Sequence Name: 71282-5
  source 1..370: mol_type = other DNA

SEQ ID NO: 281 - DNA, 379 bp, synthetic construct; identical to SEQ ID NO: 163
  misc_feature 1..379: note = Description of sequence: Sequence Name: 71282-6
  source 1..379: mol_type = other DNA

SEQ ID NO: 282 - DNA, 364 bp, synthetic construct; identical to SEQ ID NO: 164
  misc_feature 1..364: note = Description of sequence: Sequence Name: 71282-7
  source 1..364: mol_type = other DNA

SEQ ID NO: 283 - DNA, 376 bp, synthetic construct; identical to SEQ ID NO: 165
  misc_feature 1..376: note = Description of sequence: Sequence Name: 71282-8
  source 1..376: mol_type = other DNA

SEQ ID NO: 284 - DNA, 361 bp, synthetic construct; identical to SEQ ID NO: 166
  misc_feature 1..361: note = Description of sequence: Sequence Name: 71282-9
  source 1..361: mol_type = other DNA

SEQ ID NO: 285 - DNA, 364 bp, synthetic construct; identical to SEQ ID NO: 167
  misc_feature 1..364: note = Description of sequence: Sequence Name: 71282-10
  source 1..364: mol_type = other DNA

SEQ ID NO: 286 - DNA, 363 bp, synthetic construct; identical to SEQ ID NO: 168
  misc_feature 1..363: note = Description of sequence: Sequence Name: 71282-11
  source 1..363: mol_type = other DNA

SEQ ID NO: 287 - DNA, 385 bp, synthetic construct; identical to SEQ ID NO: 169
  misc_feature 1..385: note = Description of sequence: Sequence Name: 71282-12
  source 1..385: mol_type = other DNA

SEQ ID NO: 288 - DNA, 367 bp, synthetic construct; identical to SEQ ID NO: 170
  misc_feature 1..367: note = Description of sequence: Sequence Name: 71282-13
  source 1..367: mol_type = other DNA

SEQ ID NO: 289 - DNA, 379 bp, synthetic construct; identical to SEQ ID NO: 171
  misc_feature 1..379: note = Description of sequence: Sequence Name: 71282-14
  source 1..379: mol_type = other DNA

SEQ ID NO: 290 - DNA, 379 bp, synthetic construct; identical to SEQ ID NO: 172
  misc_feature 1..379: note = Description of sequence: Sequence Name: 71282-15
  source 1..379: mol_type = other DNA

SEQ ID NO: 291 - DNA, 361 bp, synthetic construct; identical to SEQ ID NO: 173
  misc_feature 1..361: note = Description of sequence: Sequence Name: 71282-16
  source 1..361: mol_type = other DNA

SEQ ID NO: 292 - DNA, 361 bp, synthetic construct; identical to SEQ ID NO: 174
  misc_feature 1..361: note = Description of sequence: Sequence Name: 71282-17
  source 1..361: mol_type = other DNA

SEQ ID NO: 293 - DNA, 370 bp, synthetic construct; identical to SEQ ID NO: 175
  misc_feature 1..370: note = Description of sequence: Sequence Name: 71282-18
  source 1..370: mol_type = other DNA

SEQ ID NO: 294 - DNA, 394 bp, synthetic construct; identical to SEQ ID NO: 176
  misc_feature 1..394: note = Description of sequence: Sequence Name: 71282-19
  source 1..394: mol_type = other DNA

SEQ ID NO: 295 - DNA, 391 bp, synthetic construct; identical to SEQ ID NO: 177
  misc_feature 1..391: note = Description of sequence: Sequence Name: 71282-20
  source 1..391: mol_type = other DNA

SEQ ID NO: 296 - DNA, 66 bp, synthetic construct
  misc_feature 1..66: note = Description of sequence: Sequence Name: 71281-1
  source 1..66: mol_type = other DNA
tgtgcgaaaaccatcccctattatgatgatttgactggtagaacgtacgactggttcgacccctgg

SEQ ID NO: 297 - DNA, 51 bp, synthetic construct
  misc_feature 1..51: note = Description of sequence: Sequence Name: 71281-2
  source 1..51: mol_type = other DNA
tgtgcgagaggaatgatgggggtcactggagccgactactttggcttctgg

SEQ ID NO: 298 - DNA, 42 bp, synthetic construct
  misc_feature 1..42: note = Description of sequence: Sequence Name: 71281-3
  source 1..42: mol_type = other DNA
tgtgtgagttgttctagcagcagctgggaatttgactactgg

SEQ ID NO: 299 - DNA, 78 bp, synthetic construct
  misc_feature 1..78: note = Description of sequence: Sequence Name: 71281-4
  source 1..78: mol_type = other DNA
tgtgtgaaaactaccggcgcttggggggacgtctttgactatgattcggggacttatctataccactttgactactgg

SEQ ID NO: 300 - DNA, 60 bp, synthetic construct
  misc_feature 1..60: note = Description of sequence: Sequence Name: 71281-5
  source 1..60: mol_type = other DNA
tgtgcgaacctgataagtttggtggacgatttttggagtgattattatgacgactactgg

SEQ ID NO: 301 - DNA, 48 bp, synthetic construct
  misc_feature 1..48: note = Description of sequence: Sequence Name: 71281-6
  source 1..48: mol_type = other DNA
tgtgcgagaagtcctggtactgcctggggtggctacatggacgtctgg

SEQ ID NO: 302 - DNA, 42 bp, synthetic construct
  misc_feature 1..42: note = Description of sequence: Sequence Name: 71281-7
  source 1..42: mol_type = other DNA
tgtgcgaggcaaaagcagcagtatttctactttgactactgg

SEQ ID NO: 303 - DNA, 54 bp, synthetic construct
  misc_feature 1..54: note = Description of sequence: Sequence Name: 71281-8
  source 1..54: mol_type = other DNA
tgtgcgcgactgaaagttgggccagcgcctggtactcgggtttttgactactgg

SEQ ID NO: 304 - DNA, 48 bp, synthetic construct
  misc_feature 1..48: note = Description of sequence: Sequence Name: 71281-9
  source 1..48: mol_type = other DNA
tgtgcgacaccctcatcagggcgtacgggggagggtatggacgtctgg

SEQ ID NO: 305 - DNA, 36 bp, synthetic construct
  misc_feature 1..36: note = Description of sequence: Sequence Name: 71281-10
  source 1..36: mol_type = other DNA
tgtgcgagacacggtgactacgcctttgactcctgg

SEQ ID NO: 306 - DNA, 45 bp, synthetic construct
  misc_feature 1..45: note = Description of sequence: Sequence Name: 71281-11
  source 1..45: mol_type = other DNA
tgtgcgcggggacaaccgtatagcatctcgccttttgagtcctgg

SEQ ID NO: 307 - DNA, 66 bp, synthetic construct
  misc_feature 1..66: note = Description of sequence: Sequence Name: 71281-12
  source 1..66: mol_type = other DNA
tgtgcgagacacgattcggcagccctcgccggggactggagcagcggctggccctttgactactgg

SEQ ID NO: 308 - DNA, 63 bp, synthetic construct
  misc_feature 1..63: note = Description of sequence: Sequence Name: 71281-13
  source 1..63: mol_type = other DNA
tgtgcgagagatcccagaatcgtggtcatggtagctgctaatcgacgaagaattgactactgg

SEQ ID NO: 309 - DNA, 60 bp, synthetic construct
  misc_feature 1..60: note = Description of sequence: Sequence Name: 71281-14
  source 1..60: mol_type = other DNA
tgtgcgagagataccgttcccaattgtggtactaagtgctatcttacctttgactactgg

SEQ ID NO: 310 - DNA, 63 bp, synthetic construct
  misc_feature 1..63: note = Description of sequence: Sequence Name: 71281-15
  source 1..63: mol_type = other DNA
tgtgcctcacatctcagtggttcggggacttatcacccaccccagtacggtttggacgtctgg

SEQ ID NO: 311 - DNA, 39 bp, synthetic construct
  misc_feature 1..39: note = Description of sequence: Sequence Name: 71281-16
  source 1..39: mol_type = other DNA
tgtactagaatccagaggacggaaggctttgactactgg

SEQ ID NO: 312 - DNA, 60 bp, synthetic construct
  misc_feature 1..60: note = Description of sequence: Sequence Name: 71281-17
  source 1..60: mol_type = other DNA
tgtgcaagagatggtcttatctctgtttcggggagttattatggtctgccgggcgtctgg

SEQ ID NO: 313 - DNA, 27 bp, synthetic construct
  misc_feature 1..27: note = Description of sequence: Sequence Name: 71281-18
  source 1..27: mol_type = other DNA
tgtgcgagaagagacgggtcgcactgg

SEQ ID NO: 314 - DNA, 75 bp, synthetic construct
  misc_feature 1..75: note = Description of sequence: Sequence Name: 71281-19
  source 1..75: mol_type = other DNA
tgtgcgagagattgggacggggatgatagtagtgtttattatagggtctacaactactacggtatggacgtctgg

SEQ ID NO: 315 - DNA, 51 bp, synthetic construct
  misc_feature 1..51: note = Description of sequence: Sequence Name: 71281-20
  source 1..51: mol_type = other DNA
tgtgcaagacagtttcttcgcggagtggtgattaactggttcggcccctgg

SEQ ID NO: 316 - DNA, 57 bp, synthetic construct
  misc_feature 1..57: note = Description of sequence: Sequence Name: 71281-21
  source 1..57: mol_type = other DNA
tgtgcgagacagaggaaggcagctcgtcctatctactactactacatggacgtctgg

SEQ ID NO: 317 - DNA, 54 bp, synthetic construct
  misc_feature 1..54: note = Description of sequence: Sequence Name: 71281-22
  source 1..54: mol_type = other DNA
tgtgcgagagccctcggtgacctgccttactactactacggtctggacgtctgg

SEQ ID NO: 318 - DNA, 51 bp, synthetic construct
  misc_feature 1..51: note = Description of sequence: Sequence Name: 71281-23
  source 1..51: mol_type = other DNA
tgtgcgagagatcattccggcccaggcaacagctggtcctttgactactgg

SEQ ID NO: 319 - DNA, 42 bp, synthetic construct
  misc_feature 1..42: note = Description of sequence: Sequence Name: 71281-24
  source 1..42: mol_type = other DNA
tgtgcgagacatggggcgaaccccactgcttttgatatctgg

SEQ ID NO: 320 - DNA, 60 bp, synthetic construct
  misc_feature 1..60: note = Description of sequence: Sequence Name: 71281-25
  source 1..60: mol_type = other DNA
tgtgcgaggactcgggatattgtattactgccaactgttgtggcgggcgactcggactgg

SEQ ID NO: 321 - DNA, 48 bp, synthetic construct
  misc_feature 1..48: note = Description of sequence: Sequence Name: 71281-26
  source 1..48: mol_type = other DNA
tgtgtgtctcccggtgacaacgttcctgactggtatttcgatctctgg

SEQ ID NO: 322 - DNA, 60 bp, synthetic construct
  misc_feature 1..60: note = Description of sequence: Sequence Name: 71281-27
  source 1..60: mol_type = other DNA
tgtgcgagacgtggtctccttctgctggcagtggctggtagcggggcttttggtatctgg

SEQ ID NO: 323 - DNA, 69 bp, synthetic construct
  misc_feature 1..69: note = Description of sequence: Sequence Name: 71281-28
  source 1..69: mol_type = other DNA
tgtgcgagagatgcgaaacgatttttggagtggtccgaaatctacttatactggtacatggacgtctgg

SEQ ID NO: 324 - DNA, 57 bp, synthetic construct
  misc_feature 1..57: note = Description of sequence: Sequence Name: 71281-29
  source 1..57: mol_type = other DNA
tgtgcgaaagactacggtgactacgacttgggctactactacgctatggacgtctgg

SEQ ID NO: 325 - DNA, 48 bp, synthetic construct
  misc_feature 1..48: note = Description of sequence: Sequence Name: 71281-30
  source 1..48: mol_type = other DNA
tgtgtgagaggccttggagtgggagctactggtcaccctcgctattgg

SEQ ID NO: 326 - DNA, 69 bp, synthetic construct
  misc_feature 1..69: note = Description of sequence: Sequence Name: 71281-31
  source 1..69: mol_type = other DNA
tgtgcgaaagacccgacagcccgacttgggtattgtagaggtggtagctgctacttggccgactactgg

SEQ ID NO: 327 - DNA, 39 bp, synthetic construct
  misc_feature 1..39: note = Description of sequence: Sequence Name: 71281-32
  source 1..39: mol_type = other DNA
tgtgtacaccatacaataactatgatagtaggctactgg

SEQ ID NO: 328 - DNA, 39 bp, synthetic construct
  misc_feature 1..39: note = Description of sequence: Sequence Name: 71281-33
  source 1..39: mol_type = other DNA
tgtgcgagaggtttcggtgaccactactttaactcctgg

SEQ ID NO: 329 - DNA, 51 bp, synthetic construct
  misc_feature 1..51: note = Description of sequence: Sequence Name: 71281-34
  source 1..51: mol_type = other DNA
tgtgcgagagattactatgccaggagctgggacggctactttgaccactgg

SEQ ID NO: 330 - DNA, 39 bp, synthetic construct
  misc_feature 1..39: note = Description of sequence: Sequence Name: 71281-35
  source 1..39: mol_type = other DNA
tgtgcgagagagaccccaggctacggtgacgaagcctgg

SEQ ID NO: 331 - DNA, 54 bp, synthetic construct
  misc_feature 1..54: note = Description of sequence: Sequence Name: 71281-36
  source 1..54: mol_type = other DNA
tgtgcggcgccaaattgtactggtggttcctgctttgatggttttaatctctgg

SEQ ID NO: 332 - DNA, 45 bp, synthetic construct
  misc_feature 1..45: note = Description of sequence: Sequence Name: 71281-37
  source 1..45: mol_type = other DNA
tgtgcgagaggcccttattgtcgtggtgctggctgccgtccctgg

SEQ ID NO: 333 - DNA, 81 bp, synthetic construct
  misc_feature 1..81: note = Description of sequence: Sequence Name: 71281-38
  source 1..81: mol_type = other DNA
tgtgcgagcgtcccacacccacattgtagtagtaccagctgctatgccggcgactactactacttcggtgtggacgtctgg

SEQ ID NO: 334 - DNA, 39 bp, synthetic construct
  misc_feature 1..39: note = Description of sequence: Sequence Name: 71281-39
  source 1..39: mol_type = other DNA
tgtgcgagagatactaccccctacggtatggacgtctgg

SEQ ID NO: 335 - DNA, 57 bp, synthetic construct
  misc_feature 1..57: note = Description of sequence: Sequence Name: 71282-1
  source 1..57: mol_type = other DNA
tgtgcgaaatattactatgatattagtgcttattacatccccaactttgactactgg

SEQ ID NO: 336 - DNA, 57 bp, synthetic construct
  misc_feature 1..57: note = Description of sequence: Sequence Name: 71282-2
  source 1..57: mol_type = other DNA
tgtgcgaagcatcttaagccttgtagtgacagctgctatgccacccttgactactgg

SEQ ID NO: 337 - DNA, 48 bp, synthetic construct
  misc_feature 1..48: note = Description of sequence: Sequence Name: 71282-3
  source 1..48: mol_type = other DNA
tgtgctagacattcacgcagtagaggtggctacacttacgactattgg

SEQ ID NO: 338 - DNA, 51 bp, synthetic construct
  misc_feature 1..51: note = Description of sequence: Sequence Name: 71282-4
  source 1..51: mol_type = other DNA
tgtgcgaatgactataccagcagtggctggtacactccccttgactactgg

SEQ ID NO: 339 - DNA, 54 bp, synthetic construct
  misc_feature 1..54: note = Description of sequence: Sequence Name: 71282-5
  source 1..54: mol_type = other DNA
tgtgcgaaagatctggaggactacggtgacttcgcggcatgttttgactcctgg

SEQ ID NO: 340 - DNA, 63 bp, synthetic construct
  misc_feature 1..63: note = Description of sequence: Sequence Name: 71282-6
  source 1..63: mol_type = other DNA
tgtgcgagagatggggattattatgatagtagtggtcactctcgagaagcttttgatatctgg

SEQ ID NO: 341 - DNA, 48 bp, synthetic construct
  misc_feature 1..48: note = Description of sequence: Sequence Name: 71282-7
  source 1..48: mol_type = other DNA
tgtgcgagagcgggcggggggacctactacagttggttcgacccctgg

SEQ ID NO: 342 - DNA, 60 bp, synthetic construct
  misc_feature 1..60: note = Description of sequence: Sequence Name: 71282-8
  source 1..60: mol_type = other DNA
tgtgcgcgagaccctaccagccactggttggtcggggagcccccctactttgactactgg

SEQ ID NO: 343 - DNA, 45 bp, synthetic construct
  misc_feature 1..45: note = Description of sequence: Sequence Name: 71282-9
  source 1..45: mol_type = other DNA
tgtgcgagagatgtgataggggagtgggagccacatgcctactgg

SEQ ID NO: 344 - DNA, 48 bp, synthetic construct
  misc_feature 1..48: note = Description of sequence: Sequence Name: 71282-10
  source 1..48: mol_type = other DNA
tgtgcgagagcgtatggtgggagctacagcggggcttttgatatctgg

SEQ ID NO: 345 - DNA, 51 bp, synthetic construct
  misc_feature 1..51: note = Description of sequence: Sequence Name: 71282-11
  source 1..51: mol_type = other DNA
tgtgcgagagatagggggggccggtcgtttttagacggtatggacgtctgg

SEQ ID NO: 346 - DNA, 69 bp, synthetic construct
  misc_feature 1..69: note = Description of sequence: Sequence Name: 71282-12
  source 1..69: mol_type = other DNA
tgtgcgagaacggtgactcccatccgatattgtactagtaccagctgctttacgcgccttcactactgg

SEQ ID NO: 347 - DNA, 54 bp, synthetic construct
  misc_feature 1..54: note = Description of sequence: Sequence Name: 71282-13
  source 1..54: mol_type = other DNA
tgtgcgagagatccgttagtgggaactactcgacttcatgcttttgatatctgg

SEQ ID NO: 348 - DNA, 63 bp, synthetic construct
  misc_feature 1..63: note = Description of sequence: Sequence Name: 71282-14
  source 1..63: mol_type = other DNA
tgtgcggcagtcgtggatattgtagtagtacccagtattatattgctgccgcctgactactgg

SEQ ID NO: 349 - DNA, 63 bp, synthetic construct
  misc_feature 1..63: note = Description of sequence: Sequence Name: 71282-15
  source 1..63: mol_type = other DNA
tgtgcgaaagatgcgggagggaggttcggggagctgttaagggatcactactttgactcctgg

SEQ ID NO: 350 - DNA, 45 bp, synthetic construct
  misc_feature 1..45: note = Description of sequence: Sequence Name: 71282-16
  source 1..45: mol_type = other DNA
tgtgccagagattcgtggaagccgcaagggggcattgacttctgg

SEQ ID NO: 351 - DNA, 45 bp, synthetic construct
  misc_feature 1..45: note = Description of sequence: Sequence Name: 71282-17
  source 1..45: mol_type = other DNA
tgcgcgagagaagtagtgactggagtgggcgctaaggcctactgg

SEQ ID NO: 352 - DNA, 57 bp, synthetic construct
  misc_feature 1..57: note = Description of sequence: Sequence Name: 71282-18
  source 1..57: mol_type = other DNA
tgtgcgaggacgtattactatgataggagtggtccgactcatgcttttgatatctgg

SEQ ID NO: 353 - DNA, 78 bp, synthetic construct
  misc_feature 1..78: note = Description of sequence: Sequence Name: 71282-19
  source 1..78: mol_type = other DNA
tgtgcgcgaggggtcgcaatggtggatactgttctcacgattactccagcgcggggaaactggcacttcgatctctgg

SEQ ID NO: 354 - DNA, 72 bp, synthetic construct
  misc_feature 1..72: note = Description of sequence: Sequence Name: 71282-20
  source 1..72: mol_type = other DNA
tgtggacacagacggcaatttcactataatagcattggttcttactacgaagaatactactttgactactgg

SEQ ID NO: 355 - DNA, 75 bp, synthetic construct
  misc_feature 1..75: note = Description of sequence: Sequence Name: 71281-1
  source 1..75: mol_type = other DNA
gaggtgcagctgttggagtctgggggaggcttggtacagcctggggggtccctgagactctcctgtgcagcctct

SEQ ID NO: 356 - DNA, 75 bp, synthetic construct
  misc_feature 1..75: note = Description of sequence: Sequence Name: 71281-2
  source 1..75: mol_type = other DNA
caggtgcaggtggtgcagtctggggctgaagtgaggaagcctggggcctcagtgaagatctcctgtaagacatct

SEQ ID NO: 357 - DNA, 75 bp, synthetic construct
  misc_feature 1..75: note = Description of sequence: Sequence Name: 71281-3
  source 1..75: mol_type = other DNA
gaggtgcagctggtggagtctgggggagacttggtccagcctggggggtccctgagactctcctgtgcagcctct

SEQ ID NO: 358 - DNA, 75 bp, synthetic construct
  misc_feature 1..75: note = Description of sequence: Sequence Name: 71281-4
  source 1..75: mol_type = other DNA
gaggtgcagctggtggagtctgggggaggcttggtccagcctggggggtccctgagactctcctgttcagcctct

SEQ ID NO: 359 - DNA, 75 bp, synthetic construct; identical to SEQ ID NO: 355
  misc_feature 1..75: note = Description of sequence: Sequence Name: 71281-5
  source 1..75: mol_type = other DNA

SEQ ID NO: 360 - DNA, 75 bp, synthetic construct
  misc_feature 1..75: note = Description of sequence: Sequence Name: 71281-6
  source 1..75: mol_type = other DNA
caggtgcacctggtggagtctgggggaggcgtggtccagcctgggaggtccctgagactctcctgtgcagcctct

SEQ ID NO: 361 - DNA, 75 bp, synthetic construct
  misc_feature 1..75: note = Description of sequence: Sequence Name: 71281-7
  source 1..75: mol_type = other DNA
gacctgcagctgttggagtctgggggaggcctggtccagcctggggggtccctgagactctcctgtgcagcctct

SEQ ID NO: 362 - DNA, 75 bp, synthetic construct
  misc_feature 1..75: note = Description of sequence: Sequence Name: 71281-8
  source 1..75: mol_type = other DNA
cagctgcagctgcaggagtcgggcccaggactggtgaagccttcggagaccctgtccctcacctgcactgtctct

SEQ ID NO: 363 - DNA, 75 bp, synthetic construct
  misc_feature 1..75: note = Description of sequence: Sequence Name: 71281-9
  source 1..75: mol_type = other DNA
gaggtgcagctggtgcagtctggagcagaggagaaaaagcccggggagtctctgaagatctcctgtaagggttct

SEQ ID NO: 364 - DNA, 75 bp, synthetic construct
  misc_feature 1..75: note = Description of sequence: Sequence Name: 71281-10
  source 1..75: mol_type = other DNA
gaggtgcaggtggtggagtctgggggaggcttggtccagcctggggggtccctgagactctcctgtgcagcctct

SEQ ID NO: 365 - DNA, 75 bp, synthetic construct
  misc_feature 1..75: note = Description of sequence: Sequence Name: 71281-11
  source 1..75: mol_type = other DNA
caggtgcagctggtgcagtctggggctgaggtgaagaagcctgggtcctcggtgaaggtctcctgcaaggcttct

SEQ ID NO: 366 - DNA, 75 bp, synthetic construct
  misc_feature 1..75: note = Description of sequence: Sequence Name: 71281-12
  source 1..75: mol_type = other DNA
cagctgcagctgcaggagtcgggcccaggactggtgaagccttcggagaccctgtccctcacctgctctgtctct

SEQ ID NO: 367 - DNA, 75 bp, synthetic construct
  misc_feature 1..75: note = Description of sequence: Sequence Name: 71281-13
  source 1..75: mol_type = other DNA
cagaagcagttggtgcagtctggagctgaggtgaagaagcctggggcctcagtgaaggtctcctgcaaggcttct

SEQ ID NO: 368 - DNA, 75 bp, synthetic construct
  misc_feature 1..75: note = Description of sequence: Sequence Name: 71281-14
  source 1..75: mol_type = other DNA
caggtgcagctggtggagtctgggggaggcttggtcaagcctggagggtccctgagactctcctgtgcagcctct

SEQ ID NO: 369 - DNA, 75 bp, synthetic construct
  misc_feature 1..75: note = Description of sequence: Sequence Name: 71281-15
  source 1..75: mol_type = other DNA
gaagtgcagctggtggagtctgggggaggcttggtaaggcctggtgagtctcttagactctcctgtgtagcccct

SEQ ID NO: 370 - DNA, 75 bp, synthetic construct
  misc_feature 1..75: note = Description of sequence: Sequence Name: 71281-16
  source 1..75: mol_type = other DNA
gaggtgcagctggtggagtctgggggaggcttggtccagcctggggggtccctgaaactctcctgtgcagcctct

SEQ ID NO: 371 - DNA, 75 bp, synthetic construct
  misc_feature 1..75: note = Description of sequence: Sequence Name: 71281-17
  source 1..75: mol_type = other DNA
gaggtgcagctggtggagtccgggggaggcttagttcagcctggggggtcccggagactctcctgtgcagcctct

SEQ ID NO: 372 - DNA, 75 bp, synthetic construct
  misc_feature 1..75: note = Description of sequence: Sequence Name: 71281-18
  source 1..75: mol_type = other DNA
gaggtgcagttggtggagactggaggaggcttaatccagcctggggggtccctgagactctcctgtgtagtctct

SEQ ID NO: 373 - DNA, 75 bp, synthetic construct
  misc_feature 1..75: note = Description of sequence: Sequence Name: 71281-19
  source 1..75: mol_type = other DNA
caggtgcagctggtgcagtctggggctgaggtgaagaagcctggggcctcagtgaaggtctcctgcaaggcttct

SEQ ID NO: 374 - DNA, 75 bp, synthetic construct
  misc_feature 1..75: note = Description of sequence: Sequence Name: 71281-20
  source 1..75: mol_type = other DNA
gcggtgcagctggtggagtccgggggaggcttagttcagcctggggggtccctgagactctcctgcgcagcctct

SEQ ID NO: 375 - DNA, 75 bp, synthetic construct; identical to SEQ ID NO: 362
  misc_feature 1..75: note = Description of sequence: Sequence Name: 71281-21
  source 1..75: mol_type = other DNA

SEQ ID NO: 376 - DNA, 75 bp, synthetic construct
  misc_feature 1..75: note = Description of sequence: Sequence Name: 71281-22
  source 1..75: mol_type = other DNA
caggtgcagctgcaggagtcgggcccaggactggtgaagccttcacagaccctgtccctcacctgcactgtctct

SEQ ID NO: 377 - DNA, 75 bp, synthetic construct
  misc_feature 1..75: note = Description of sequence: Sequence Name: 71281-23
  source 1..75: mol_type = other DNA
caggtgcagctgcaggagtcgggcccaggactggtgaagccttcggggaccctgtccctcacctgcgcagtctct

SEQ ID NO: 378 - DNA, 75 bp, synthetic construct
  misc_feature 1..75: note = Description of sequence: Sequence Name: 71281-24
  source 1..75: mol_type = other DNA
gaagtgcagctggtgcagtccggagcagaggtgaaaaagcccggggagtctctcaggatctcctgtaaggattct

SEQ ID NO: 379 - DNA, 75 bp, synthetic construct; identical to SEQ ID NO: 355
  misc_feature 1..75: note = Description of sequence: Sequence Name: 71281-25
  source 1..75: mol_type = other DNA

SEQ ID NO: 380 - DNA, 75 bp, synthetic construct
  misc_feature 1..75: note = Description of sequence: Sequence Name: 71281-26
  source 1..75: mol_type = other DNA
gaggtgcagttgctggagtctgggggaggcgtggtacagcctggggggtccctgagactctcctgtgcagcctct

SEQ ID NO: 381 - DNA, 75 bp, synthetic construct
  misc_feature 1..75: note = Description of sequence: Sequence Name: 71281-27
  source 1..75: mol_type = other DNA
cagctgcagttgcaggagtcgggcccaggactggtgaagccttcggagaccctgtccctcacatgcactgtttct

SEQ ID NO: 382 - DNA, 75 bp, synthetic construct
  misc_feature 1..75: note = Description of sequence: Sequence Name: 71281-28
  source 1..75: mol_type = other DNA
caggtgcaactagtgcagtctggggctgaagtgaagaagcctggggcctcagtgaaggtctcctgtcaggcttct

SEQ ID NO: 383 - DNA, 75 bp, synthetic construct
  misc_feature 1..75: note = Description of sequence: Sequence Name: 71281-29
  source 1..75: mol_type = other DNA
gaagtgcagctggtgcagtctggagcagaggtgaaaaagcccggggagtctctgaggatctcctgtaagggttct

SEQ ID NO: 384 - DNA, 75 bp, synthetic construct
  misc_feature 1..75: note = Description of sequence: Sequence Name: 71281-30
  source 1..75: mol_type = other DNA
caggtgcaggtggtggagtcggggggaggcttggtcaagcctggagggtccctgagactctcctgtgtagcctct

SEQ ID NO: 385 - DNA, 75 bp, synthetic construct
  misc_feature 1..75: note = Description of sequence: Sequence Name: 71281-31
  source 1..75: mol_type = other DNA
caggtgcagctggtggagtcggggggaggcgtggtccagcctgggaggtccctgagactctcctgtgcagcctct

SEQ ID NO: 386 - DNA, 75 bp, synthetic construct
  misc_feature 1..75: note = Description of sequence: Sequence Name: 71281-32
  source 1..75: mol_type = other DNA
cagatcaccttgaaggagtctggtcctacgctggtgaaacccacacagaccctcacgctgacctgcaccttctct

SEQ ID NO: 387 - DNA, 75 bp, synthetic construct
  misc_feature 1..75: note = Description of sequence: Sequence Name: 71281-33
  source 1..75: mol_type = other DNA
gacgtgcacctggtggagtctgggggaggcttggtccagcctggggggtccctgagactctcctgtgcagcctct

SEQ ID NO: 388 - DNA, 75 bp, synthetic construct
  misc_feature 1..75: note = Description of sequence: Sequence Name: 71281-34
  source 1..75: mol_type = other DNA
caggtgcaactggtggagtctgggggaggcgtggtccagcctggggcgtccctgagactctcctgtgcagcctct

SEQ ID NO: 389 - DNA, 75 bp, synthetic construct
  misc_feature 1..75: note = Description of sequence: Sequence Name: 71281-35
  source 1..75: mol_type = other DNA
gaggtgcagctggtggagtctggaggaggcttgatccagcctggggggtccctgagactctcctgtgcagcctct

SEQ ID NO: 390 - DNA, 75 bp, synthetic construct
  misc_feature 1..75: note = Description of sequence: Sequence Name: 71281-36
  source 1..75: mol_type = other DNA
caaatgcagctggtgcagtctgggcctgaggtgaagaagcctgggacctcagtgaagatcccctgcagggcttct

SEQ ID NO: 391 - DNA, 75 bp, synthetic construct
  misc_feature 1..75: note = Description of sequence: Sequence Name: 71281-37
  source 1..75: mol_type = other DNA
gaggtgccgctggtggaatctggaggaggcttgatccagcctggggggtccctgagactctcctgtgcagcctct

SEQ ID NO: 392 - DNA, 75 bp, synthetic construct
  misc_feature 1..75: note = Description of sequence: Sequence Name: 71281-38
  source 1..75: mol_type = other DNA
caggtgcaactggtgcaatctgggtctgagttgaagaagcctggggcctcagtgaaggtttcctgcaaggcttcg

SEQ ID NO: 393 - DNA, 75 bp, synthetic construct
  misc_feature 1..75: note = Description of sequence: Sequence Name: 71281-39
  source 1..75: mol_type = other DNA
caggtgcagctggtggagtctgggggaggcgtggtccagcctggggggtccctgagactctcctgtgcagcctct

SEQ ID NO: 394 - DNA, 75 bp, synthetic construct; identical to SEQ ID NO: 355
  misc_feature 1..75: note = Description of sequence: Sequence Name: 71282-1
  source 1..75: mol_type = other DNA

SEQ ID NO: 395 - DNA, 75 bp, synthetic construct
  misc_feature 1..75: note = Description of sequence: Sequence Name: 71282-2
  source 1..75: mol_type = other DNA
gaggtgcagctgttggagtctgggggaggcttggtacagcctggggggtccctgagactctcctgtgtagcctct

SEQ ID NO: 396 - DNA, 75 bp, synthetic construct
  misc_feature 1..75: note = Description of sequence: Sequence Name: 71282-3
  source 1..75: mol_type = other DNA
cagttgcagctgcaggagtcgggcccaggattggtgaagtcctcggagaccctgtccctcacctgctctgtctct

SEQ ID NO: 397 - DNA, 75 bp, synthetic construct
  misc_feature 1..75: note = Description of sequence: Sequence Name: 71282-4
  source 1..75: mol_type = other DNA
caggtccagctggtgcagtctggggctgaggtgaagaagcctggatcctcggtgaaggtctcctgcaaggcttct

SEQ ID NO: 398 - DNA, 75 bp, synthetic construct
  misc_feature 1..75: note = Description of sequence: Sequence Name: 71282-5
  source 1..75: mol_type = other DNA
gaggtgcaggtgttggagtctgggggaggcttggtacagcctggggggtccctgaggctctcctgtgcagcctct

SEQ ID NO: 399 - DNA, 75 bp, synthetic construct
  misc_feature 1..75: note = Description of sequence: Sequence Name: 71282-6
  source 1..75: mol_type = other DNA
gaggtgcagctggtggagtcggggggaggcttggtacagcctggggggtccctgagactctcctgtgcagcctcc

SEQ ID NO: 400 - DNA, 75 bp, synthetic construct
  misc_feature 1..75: note = Description of sequence: Sequence Name: 71282-7
  source 1..75: mol_type = other DNA
caggtgcagctggtggagtctgggggaggcgtggtccagcctgggaggtccctgagactctcctgtgcagcctct

SEQ ID NO: 401 - DNA, 75 bp, synthetic construct
  misc_feature 1..75: note = Description of sequence: Sequence Name: 71282-8
  source 1..75: mol_type = other DNA
gaggtgcagctggtggagtctgggggaggcttggtccagcctggggggtccctgagactctcctgtgcagcctct

SEQ ID NO: 402 - DNA, 75 bp, synthetic construct
  misc_feature 1..75: note = Description of sequence: Sequence Name: 71282-9
  source 1..75: mol_type = other DNA
gaggtgcagctggtggagtctgggggaggtctggtcaagccgggggggtccctgagactctcctgtgcagcctct

SEQ ID NO: 403 - DNA, 75 bp, synthetic construct
  misc_feature 1..75: note = Description of sequence: Sequence Name: 71282-10
  source 1..75: mol_type = other DNA
caggtgcagctggtggagtctgggggaggcgtggtccagcctgggaggtccctgagactctcctgtgtagcctct

SEQ ID NO: 404 - DNA, 75 bp, synthetic construct
  misc_feature 1..75: note = Description of sequence: Sequence Name: 71282-11
  source 1..75: mol_type = other DNA
gaggtgcagctggtggagtctggaggaggcttggtccagcctggggggtccctgagactctcctgtgcagcctct

SEQ ID NO: 405 - DNA, 75 bp, synthetic construct
  misc_feature 1..75: note = Description of sequence: Sequence Name: 71282-12
  source 1..75: mol_type = other DNA
caggtgcagctggtgcagtctggggctgaggtgaagaagcctgggtcctcggtgaaggtctcctgcagggcttct

SEQ ID NO: 406 - DNA, 75 bp, synthetic construct
  misc_feature 1..75: note = Description of sequence: Sequence Name: 71282-13
  source 1..75: mol_type = other DNA
gaggtgcagttggtggagtcggggggaggcttggtccaccctggggggtccctgagactctcctgtgcagcctct

SEQ ID NO: 407 - DNA, 75 bp, synthetic construct
  misc_feature 1..75: note = Description of sequence: Sequence Name: 71282-14
  source 1..75: mol_type = other DNA
caggtgcagctggtggagtctgggggaggcgtggtccagcctgggaggtccctaagactctcctgtgcagcctct

SEQ ID NO: 408 - DNA, 75 bp, synthetic construct
  misc_feature 1..75: note = Description of sequence: Sequence Name: 71282-15
  source 1..75: mol_type = other DNA
gaggtgcagctgttggagtctgggggaggcttggttcagcctggggggtccctgagactctcctgtgtagcctct

SEQ ID NO: 409 - DNA, 75 bp, synthetic construct
  misc_feature 1..75: note = Description of sequence: Sequence Name: 71282-16
  source 1..75: mol_type = other DNA
caagtccagcttgtgcagtctggggctgaggtgaagaagactggggcctcactgaaggtttcctgcaaggcttct

SEQ ID NO: 410 - DNA, 75 bp, synthetic construct
  misc_feature 1..75: note = Description of sequence: Sequence Name: 71282-17
  source 1..75: mol_type = other DNA
caggtgaagctggtacaatctggggctgaggtgaagaggcctggggcctcagttaaggtttcctgcaccgcatct

SEQ ID NO: 411 - DNA, 75 bp, synthetic construct
  misc_feature 1..75: note = Description of sequence: Sequence Name: 71282-18
  source 1..75: mol_type = other DNA
caggtgcagctgcaggagtcgggcccaggactggtgaagccttcggagaccctgtccctcacctgcactgtctct

SEQ ID NO: 412 - DNA, 75 bp, synthetic construct
  misc_feature 1..75: note = Description of sequence: Sequence Name: 71282-19
  source 1..75: mol_type = other DNA
gatgtgcatctggtggagtctgggggaggcttggtcccgccgggggggtccctgagactctcctgtacaccctct

SEQ ID NO: 413 - DNA, 75 bp, synthetic construct
  misc_feature 1..75: note = Description of sequence: Sequence Name: 71282-20
  source 1..75: mol_type = other DNA
cagatcaccttgaaggagtctggtcctacactggtgaaacccacacagaccctcacgctgacctgcaccttctct

SEQ ID NO: 414 - DNA, 51 bp, synthetic construct
  misc_feature 1..51: note = Description of sequence: Sequence Name: 71281-1
  source 1..51: mol_type = other DNA
atgacctgggtccgccaggctccagggaaggggctggaatgggtctcagtt

SEQ ID NO: 415 - DNA, 51 bp, synthetic construct
  misc_feature 1..51: note = Description of sequence: Sequence Name: 71281-2
  source 1..51: mol_type = other DNA
atgtattgggtgcgccaggcccctggacaagggcttgagtggatgggactg

SEQ ID NO: 416 - DNA, 51 bp, synthetic construct
  misc_feature 1..51: note = Description of sequence: Sequence Name: 71281-3
  source 1..51: mol_type = other DNA
atgagctgggtccgccaggctccagggaaggggctggagtgggtggccaac

SEQ ID NO: 417 - DNA, 51 bp, synthetic construct
  misc_feature 1..51: note = Description of sequence: Sequence Name: 71281-4
  source 1..51: mol_type = other DNA
atgaactgggtccgccaggctccagggaagggactggaatttgtttcaggt

SEQ ID NO: 418 - DNA, 51 bp, synthetic construct
  misc_feature 1..51: note = Description of sequence: Sequence Name: 71281-5
  source 1..51: mol_type = other DNA
atgagctgggtccgccaggctccagggatggggctggagtgggtctcaggt

SEQ ID NO: 419 - DNA, 51 bp, synthetic construct
  misc_feature 1..51: note = Description of sequence: Sequence Name: 71281-6
  source 1..51: mol_type = other DNA
atgcactgggtccgccaggctccaggcaaggggctggagtgggtggcactt

SEQ ID NO: 420 - DNA, 51 bp, synthetic construct
  misc_feature 1..51: note = Description of sequence: Sequence Name: 71281-7
  source 1..51: mol_type = other DNA
atgagttgggtccgccaggctccagggaaggggctggagtgggtctcgtct

SEQ ID NO: 421 - DNA, 51 bp, synthetic construct
  misc_feature 1..51: note = Description of sequence: Sequence Name: 71281-8
  source 1..51: mol_type = other DNA
tggggctggatccgccagccccccgggaaggggctggaatggattggaaat

SEQ ID NO: 422 - DNA, 51 bp, synthetic construct
  misc_feature 1..51: note = Description of sequence: Sequence Name: 71281-9
  source 1..51: mol_type = other DNA
gtcgcctgggtgcgccagatgcccgggaaaggcctggagtggatggggatc

SEQ ID NO: 423 - DNA, 51 bp, synthetic construct
  misc_feature 1..51: note = Description of sequence: Sequence Name: 71281-10
  source 1..51: mol_type = other DNA
atgggttgggtccgccaggctccagggaaggggctggagtgggtggccaac

SEQ ID NO: 424 - DNA, 51 bp, synthetic construct
  misc_feature 1..51: note = Description of sequence: Sequence Name: 71281-11
  source 1..51: mol_type = other DNA
gtcagctgggtgcgacaggcccctgggcaaggtcttgagtggatggggggc

SEQ ID NO: 425 - DNA, 51 bp, synthetic construct
  misc_feature 1..51: note = Description of sequence: Sequence Name: 71281-12
  source 1..51: mol_type = other DNA
tggggctggatccgccagcccccagggaaggggctggagtggattgggact

SEQ ID NO: 426 - DNA, 51 bp, synthetic construct
  misc_feature 1..51: note = Description of sequence: Sequence Name: 71281-13
  source 1..51: mol_type = other DNA
atcacctgggtgcgacaggcccctggacaagggcttgagtgggtgggatgg

SEQ ID NO: 427 - DNA, 51 bp, synthetic construct
  misc_feature 1..51: note = Description of sequence: Sequence Name: 71281-14
  source 1..51: mol_type = other DNA
atgacttggatgcgccaggctccagggaaggggctggagtgggtttcatac

SEQ ID NO: 428 - DNA, 51 bp, synthetic construct
  misc_feature 1..51: note = Description of sequence: Sequence Name: 71281-15
  source 1..51: mol_type = other DNA
atgaactgggtccgccaggctccagggcaggggctggagtgggtcggccgg

SEQ ID NO: 429 - DNA, 51 bp, synthetic construct
  misc_feature 1..51: note = Description of sequence: Sequence Name: 71281-16
  source 1..51: mol_type = other DNA
atgcactgggtccgccaggcttccgggaaagggctggagtgggttggccgt

SEQ ID NO: 430 - DNA, 51 bp, synthetic construct
  misc_feature 1..51: note = Description of sequence: Sequence Name: 71281-17
  source 1..51: mol_type = other DNA
atgtactgggtccgccaagctccagggaaggggctggtgtgggtctcacgt

SEQ ID NO: 431 - DNA, 51 bp, synthetic construct
  misc_feature 1..51: note = Description of sequence: Sequence Name: 71281-18
  source 1..51: mol_type = other DNA
atgagctgggtccgccaggctccagggaagcgtctggagtgggtctcagtt

SEQ ID NO: 432 - DNA, 51 bp, synthetic construct
  misc_feature 1..51: note = Description of sequence: Sequence Name: 71281-19
  source 1..51: mol_type = other DNA
atgcactgggtgcgacaggcccctggacaagggcttgagtggatgggatgg

SEQ ID NO: 433 - DNA, 51 bp, synthetic construct
  misc_feature 1..51: note = Description of sequence: Sequence Name: 71281-20
  source 1..51: mol_type = other DNA
atgcactgggtccgccaagccccagggaaggggccggtgtgggtctcaggt

SEQ ID NO: 434 - DNA, 51 bp, synthetic construct
  misc_feature 1..51: note = Description of sequence: Sequence Name: 71281-21
  source 1..51: mol_type = other DNA
tggggctggatccgccagccccccgggaaggggctggagtggattgggact

SEQ ID NO: 435 - DNA, 51 bp, synthetic construct
  misc_feature 1..51: note = Description of sequence: Sequence Name: 71281-22
  source 1..51: mol_type = other DNA
tggagctggatccgccagcacccagggaagggcctggagtggattgggtac

SEQ ID NO: 436 - DNA, 51 bp, synthetic construct
  misc_feature 1..51: note = Description of sequence: Sequence Name: 71281-23
  source 1..51: mol_type = other DNA
tggaattgggtccgccagtccccagggaaggggctggagtggattggggaa

SEQ ID NO: 437 - DNA, 51 bp, synthetic construct
  misc_feature 1..51: note = Description of sequence: Sequence Name: 71281-24
  source 1..51: mol_type = other DNA
atcagctgggtgcgccagatgcccgggaaaggcctggagtggatggggagg

SEQ ID NO: 438 - DNA, 51 bp, synthetic construct
  misc_feature 1..51: note = Description of sequence: Sequence Name: 71281-25
  source 1..51: mol_type = other DNA
atgagctgggtccgccaggccccagggaaggggctggagtgggtctcagtt

SEQ ID NO: 439 - DNA, 51 bp, synthetic construct
  misc_feature 1..51: note = Description of sequence: Sequence Name: 71281-26
  source 1..51: mol_type = other DNA
atgacctgggtccgccaggctccagggaaggggctggagtgggtcgcaact

SEQ ID NO: 440 - DNA, 51 bp, synthetic construct
  misc_feature 1..51: note = Description of sequence: Sequence Name: 71281-27
  source 1..51: mol_type = other DNA
tggggctggatccgccaggccccagggaaggggctagagtggattgggaat

SEQ ID NO: 441 - DNA, 51 bp, synthetic construct
  misc_feature 1..51: note = Description of sequence: Sequence Name: 71281-28
  source 1..51: mol_type = other DNA
atgcactgggtgcgacaggcccctggacaagggcctgagtggatgggacgg

SEQ ID NO: 442 - DNA, 51 bp, synthetic construct
  misc_feature 1..51: note = Description of sequence: Sequence Name: 71281-29
  source 1..51: mol_type = other DNA
atcagctggatgcgccagatgcccgggaaaggcctggagtggatggggagg

SEQ ID NO: 443 - DNA, 51 bp, synthetic construct
  misc_feature 1..51: note = Description of sequence: Sequence Name: 71281-30
  source 1..51: mol_type = other DNA
atgagttgggtccgccaggctccggggaaggggctggagtggatttcatac

SEQ ID NO: 444 - DNA, 51 bp, synthetic construct
  misc_feature 1..51: note = Description of sequence: Sequence Name: 71281-31
  source 1..51: mol_type = other DNA
atgcattgggtccgccaggctccaggcaaggggctggagtgggtggcattt

SEQ ID NO: 445 - DNA, 51 bp, synthetic construct
  misc_feature 1..51: note = Description of sequence: Sequence Name: 71281-32
  source 1..51: mol_type = other DNA
gtgggctggatccgtcagcccccaggaaaggccctggagtggcttgcagtc

SEQ ID NO: 446 - DNA, 51 bp, synthetic construct
  misc_feature 1..51: note = Description of sequence: Sequence Name: 71281-33
  source 1..51: mol_type = other DNA
atgaactgggtccgccaggctccagggaaggggctggagtgggtctcagtt

SEQ ID NO: 447 - DNA, 51 bp, synthetic construct
  misc_feature 1..51: note = Description of sequence: Sequence Name: 71281-34
  source 1..51: mol_type = other DNA
atgcactgggtccgccaggctccaggcaaggggctggagtgggtggcagtc

SEQ ID NO: 448 - DNA, 51 bp, synthetic construct
  misc_feature 1..51: note = Description of sequence: Sequence Name: 71281-35
  source 1..51: mol_type = other DNA
atgagctgggtccgccaggctccagggaaggggctggagtgggtctcactt

SEQ ID NO: 449 - DNA, 51 bp, synthetic construct
  misc_feature 1..51: note = Description of sequence: Sequence Name: 71281-36
  source 1..51: mol_type = other DNA
gtacagtgggtgcgacaggctcgtggacaacgccttgagtggataggatgg

SEQ ID NO: 450 - DNA, 51 bp, synthetic construct
  misc_feature 1..51: note = Description of sequence: Sequence Name: 71281-37
  source 1..51: mol_type = other DNA
atgtattgggtccgccaggctccagggaaggggctggagtgggtctcactg

SEQ ID NO: 451 - DNA, 51 bp, synthetic construct
  misc_feature 1..51: note = Description of sequence: Sequence Name: 71281-38
  source 1..51: mol_type = other DNA
gtgaattgggtgcgacaggcccctggacaaggacttgagtggatgggatgg

SEQ ID NO: 452 - DNA, 51 bp, synthetic construct
  misc_feature 1..51: note = Description of sequence: Sequence Name: 71281-39
  source 1..51: mol_type = other DNA
atccactgggtccgccaggctccaggcaaggggctggagtgggtggcagcg

SEQ ID NO: 453 - DNA, 51 bp, synthetic construct
  misc_feature 1..51: note = Description of sequence: Sequence Name: 71282-1
  source 1..51: mol_type = other DNA
atgagctgggtccgccaggctccaggaaaggggctggggtgggtctcagct

SEQ ID NO: 454 - DNA, 51 bp, synthetic construct
  misc_feature 1..51: note = Description of sequence: Sequence Name: 71282-2
  source 1..51: mol_type = other DNA
atgagctgggtccgccaggctccagggaaggggctggagtgggtctcaggt

SEQ ID NO: 455 - DNA, 51 bp, synthetic construct
  misc_feature 1..51: note = Description of sequence: Sequence Name: 71282-3
  source 1..51: mol_type = other DNA
tgggcctgggtccgccagcccccagggaagggcctggagtggattggcagt

SEQ ID NO: 456 - DNA, 51 bp, synthetic construct
  misc_feature 1..51: note = Description of sequence: Sequence Name: 71282-4
  source 1..51: mol_type = other DNA
atcagctgggtgcgacaggcccctggacaagggcttgagtggatgggaggg

SEQ ID NO: 457 - DNA, 51 bp, synthetic construct
  misc_feature 1..51: note = Description of sequence: Sequence Name: 71282-5
  source 1..51: mol_type = other DNA
atgacctgggtccgccaggctccagggaagggactggagtgggtctcaact

SEQ ID NO: 458 - DNA, 51 bp, synthetic construct
  misc_feature 1..51: note = Description of sequence: Sequence Name: 71282-6
  source 1..51: mol_type = other DNA
atgaagtgggtccgccaggctccagggaaggggctggagtggatttcagac

SEQ ID NO: 459 - DNA, 51 bp, synthetic construct
  misc_feature 1..51: note = Description of sequence: Sequence Name: 71282-7
  source 1..51: mol_type = other DNA
atccactgggtccgccaggctccaggcaaggggctggagtgggtggctgtt

SEQ ID NO: 460 - DNA, 51 bp, synthetic construct; identical to SEQ ID NO: 416
  misc_feature 1..51: note = Description of sequence: Sequence Name: 71282-8
  source 1..51: mol_type = other DNA

SEQ ID NO: 461 - DNA, 51 bp, synthetic construct
  misc_feature 1..51: note = Description of sequence: Sequence Name: 71282-9
  source 1..51: mol_type = other DNA
atgcactgggtccgccaggctccagggaagggcctggagtgggtctcattc

SEQ ID NO: 462 - DNA, 51 bp, synthetic construct; identical to SEQ ID NO: 419
  misc_feature 1..51: note = Description of sequence: Sequence Name: 71282-10
  source 1..51: mol_type = other DNA

SEQ ID NO: 463 - DNA, 51 bp, synthetic construct
  misc_feature 1..51: note = Description of sequence: Sequence Name: 71282-11
  source 1..51: mol_type = other DNA
atgagctgggtccgccaggctccagggaaggggctggagtgggtctcagtt

SEQ ID NO: 464 - DNA, 51 bp, synthetic construct; identical to SEQ ID NO: 456
  misc_feature 1..51: note = Description of sequence: Sequence Name: 71282-12
  source 1..51: mol_type = other DNA

SEQ ID NO: 465 - DNA, 51 bp, synthetic construct; identical to SEQ ID NO: 446
  misc_feature 1..51: note = Description of sequence: Sequence Name: 71282-13
  source 1..51: mol_type = other DNA

SEQ ID NO: 466 - DNA, 51 bp, synthetic construct
  misc_feature 1..51: note = Description of sequence: Sequence Name: 71282-14
  source 1..51: mol_type = other DNA
atgcactgggtccgccaggctccaggcaaggggctggagtgggtggcagtt

SEQ ID NO: 467 - DNA, 51 bp, synthetic construct
  misc_feature 1..51: note = Description of sequence: Sequence Name: 71282-15
  source 1..51: mol_type = other DNA
atgagctgggtccgccaggctccagggaaggggctggagtgggtctcaatg

SEQ ID NO: 468 - DNA, 51 bp, synthetic construct
  misc_feature 1..51: note = Description of sequence: Sequence Name: 71282-16
  source 1..51: mol_type = other DNA
atgcactgggtgcgccaggcccccggacaaaggctggagtggatgggacgg

SEQ ID NO: 469 - DNA, 51 bp, synthetic construct
  misc_feature 1..51: note = Description of sequence: Sequence Name: 71282-17
  source 1..51: mol_type = other DNA
atgcactgggtgcggcaggcccccggacgagggcttgagtggatgggcgta

SEQ ID NO: 470 - DNA, 51 bp, synthetic construct
  misc_feature 1..51: note = Description of sequence: Sequence Name: 71282-18
  source 1..51: mol_type = other DNA
tggagctggatccggcagcccccagggaagggactggagtggattgggtat

SEQ ID NO: 471 - DNA, 51 bp, synthetic construct
  misc_feature 1..51: note = Description of sequence: Sequence Name: 71282-19
  source 1..51: mol_type = other DNA
atgacctgggtccgccaggctccagggaaggggctggagtgggtggccaat

SEQ ID NO: 472 - DNA, 51 bp, synthetic construct
  misc_feature 1..51: note = Description of sequence: Sequence Name: 71282-20
  source 1..51: mol_type = other DNA
gtgggctggatccgtcagcccccaggaaaggccctggagtggcttgcactc

SEQ ID NO: 473 - DNA, 114 bp, synthetic construct
  misc_feature 1..114: note = Description of sequence: Sequence Name: 71281-1
  source 1..114: mol_type = other DNA
tactacgcagactccgtgaagggccggttcaccatctccagagacaattccaacaacacgctgtatctgcaaatgaacagcctgagagtcgaggacacggccgtatattactgt

SEQ ID NO: 474 - DNA, 114 bp, synthetic construct
  misc_feature 1..114: note = Description of sequence: Sequence Name: 71281-2
  source 1..114: mol_type = other DNA
cgcaacgcacaaggatttgagggcagactcaccatgaccagggacacgtccacgagtacagtctacatggaactgaataggctgacatctgacgacacggccgtctattactgt

SEQ ID NO: 475 - DNA, 114 bp, synthetic construct
  misc_feature 1..114: note = Description of sequence: Sequence Name: 71281-3
  source 1..114: mol_type = other DNA
tactatgtggactctgtgaagggccgattcaccatctccagagacaacgccaagaagttagtgtatctgcaaatgaacagcctgagagccgaggacacggccgtgtattattgt

SEQ ID NO: 476 - DNA, 114 bp, synthetic construct
  misc_feature 1..114: note = Description of sequence: Sequence Name: 71281-4
  source 1..114: mol_type = other DNA
tactacgcagactcagtgaagggcagattcaccatctccagagacaattccaagaacacactgtatcttcaaatgagcagtctgagagctgaggacacggctgtatattactgt

SEQ ID NO: 477 - DNA, 114 bp, synthetic construct
  misc_feature 1..114: note = Description of sequence: Sequence Name: 71281-5
  source 1..114: mol_type = other DNA
tactacgcagactccgtgaagggccggttcaccatctccagagacaattccaagaacaccctgtttctgcaaatgaacagcctgagagccgacgacacggccgtatattattgt

SEQ ID NO: 478 - DNA, 114 bp, synthetic construct
  misc_feature 1..114: note = Description of sequence: Sequence Name: 71281-6
  source 1..114: mol_type = other DNA
tattacgcagagtccgtgaagggccgattcaccatctccagagacaattccaagaacacgctgtatgtacagatggacagcctgagaactgaggacacggctgtttattactgt

SEQ ID NO: 479 - DNA, 114 bp, synthetic construct
  misc_feature 1..114: note = Description of sequence: Sequence Name: 71281-7
  source 1..114: mol_type = other DNA
tactacgctgcctccgtgaagggccgcttcatcatctccagagacaattccagggacactctgtatctgcagatgaccagcctgagagccgaggacacggccctctactactgt

SEQ ID NO: 480 - DNA, 114 bp, synthetic construct
  misc_feature 1..114: note = Description of sequence: Sequence Name: 71281-8
  source 1..114: mol_type = other DNA
tactacaacccgtccctcagaagtcgagtcaccatatccgtagacacgttcaagagccacttctccctgaacctgaactccgtgaccgccgcagacacgtctatatattactgt

SEQ ID NO: 481 - DNA, 114 bp, synthetic construct
  misc_feature 1..114: note = Description of sequence: Sequence Name: 71281-9
  source 1..114: mol_type = other DNA
agatacagcccgtccttccaaggccaggtcaccatctcagccgacaagtccatcagcaccgcctacctgcagtggagcagcctgaaggcctcggacaccgccatatattactgt

SEQ ID NO: 482 - DNA, 114 bp, synthetic construct
  misc_feature 1..114: note = Description of sequence: Sequence Name: 71281-10
  source 1..114: mol_type = other DNA
tattatgtgggctctgtgaggggccgattcaccatctccagagacaacgcccagaactcagtgtatctgcaattgaactccctgagagccgaggacacggctacatattattgt

SEQ ID NO: 483 - DNA, 114 bp, synthetic construct
  misc_feature 1..114: note = Description of sequence: Sequence Name: 71281-11
  source 1..114: mol_type = other DNA
gactacgcaaagaaattccagggcagagtctcgattaccgcggacgagcccacgaatacagcctacatggaactgaacagtctgcgatctgaagacacggccttttatttctgt

SEQ ID NO: 484 - DNA, 114 bp, synthetic construct
  misc_feature 1..114: note = Description of sequence: Sequence Name: 71281-12
  source 1..114: mol_type = other DNA
tactacaacccgtccctcaagagtcgagtcaccatatccgtagacacgtccaagaaccagttctccctgaacctgagctctgtgaccgccgcagacacggctgtctattactgt

SEQ ID NO: 485 - DNA, 114 bp, synthetic construct
  misc_feature 1..114: note = Description of sequence: Sequence Name: 71281-13
  source 1..114: mol_type = other DNA
gactatgcacagaagttccaggacagagtcaccttgaccacagacacatccacgaacacagcctacttggaactgaggagcctgaaatctgacgacacggccgtgtattactgt

SEQ ID NO: 486 - DNA, 114 bp, synthetic construct
  misc_feature 1..114: note = Description of sequence: Sequence Name: 71281-14
  source 1..114: mol_type = other DNA
aactacgcagactctgtgaagggccgattcaccatctccagagacaacgccaggaactcactgtatctgcaaatgaacagcctgagagccgaggacacggctgtgtatttttgt

SEQ ID NO: 487 - DNA, 114 bp, synthetic construct
  misc_feature 1..114: note = Description of sequence: Sequence Name: 71281-15
  source 1..114: mol_type = other DNA
gaccacgctgcacccgtgagaggcagattcagagtctcaagagatgattcaaaaaacacggtgtatctgcagatgaacagcctgaaagtcgaggacacaggcgtgtattactgt

SEQ ID NO: 488 - DNA, 114 bp, synthetic construct
  misc_feature 1..114: note = Description of sequence: Sequence Name: 71281-16
  source 1..114: mol_type = other DNA
gcatatgctgcgtcggtgaaaggcagattcaccatctccagagatgattcaaagaacacggcgtatctgcaaatgaacagcctgaaaaccgaggacacggccgtatattactgt

SEQ ID NO: 489 - DNA, 114 bp, synthetic construct
  misc_feature 1..114: note = Description of sequence: Sequence Name: 71281-17
  source 1..114: mol_type = other DNA
agctacgcggactccgtgaagggccgattcaccatctccagagacaacgccaagaacactctttatttgcaaatgaacagtctgagagtcgaggacacggctgtctattactgt

SEQ ID NO: 490 - DNA, 114 bp, synthetic construct
  misc_feature 1..114: note = Description of sequence: Sequence Name: 71281-18
  source 1..114: mol_type = other DNA
tactacgcggagtccgtcaagggccgattcaccgtctccagagacgagtccaggaacacactatttcttcaaatgcatagtctgagagtcgaggacacggccgtctattattgt

SEQ ID NO: 491 - DNA, 114 bp, synthetic construct
  misc_feature 1..114: note = Description of sequence: Sequence Name: 71281-19
  source 1..114: mol_type = other DNA
aactatgcacagaagtttcagggcagggtcaccatgaccagggacacgtccatcagcacagcttacatggagttgagcaggctgagatctgacgacacggccgtgtattactgt

SEQ ID NO: 492 - DNA, 114 bp, synthetic construct
  misc_feature 1..114: note = Description of sequence: Sequence Name: 71281-20
  source 1..114: mol_type = other DNA
acctatgcggactccgtgaagggccgattcaccatctccagagacaacgccaagaacatgctgtatctgcaaatgaacagtctgagagccgaggacacgggtgtgtattactgt

SEQ ID NO: 493 - DNA, 114 bp, synthetic construct
  misc_feature 1..114: note = Description of sequence: Sequence Name: 71281-21
  source 1..114: mol_type = other DNA
tactacaacccgtccctcaagggtcgaatcaccatatccgcagacacgtccaagaaccagttctccctgaagctgagctctgtgaccgccgcagacacggctgtctattactgt

SEQ ID NO: 494 - DNA, 114 bp, synthetic construct
  misc_feature 1..114: note = Description of sequence: Sequence Name: 71281-22
  source 1..114: mol_type = other DNA
tactacaacccgtccctcaagagtcgcgccaccatatcagtagacacgtctaagaaccacttctccctgaagctgaggtctgtgactgccgcggacacggccgtatattactgt

SEQ ID NO: 495 - DNA, 114 bp, synthetic construct
  misc_feature 1..114: note = Description of sequence: Sequence Name: 71281-23
  source 1..114: mol_type = other DNA
atctacaacccgtccctcaagagtcgagtcaccatgtcagtagacaagtccaacaaccaattctccctgaacctgacctctatgaccgccgcggacacggccatttattactgt

SEQ ID NO: 496 - DNA, 114 bp, synthetic construct
  misc_feature 1..114: note = Description of sequence: Sequence Name: 71281-24
  source 1..114: mol_type = other DNA
aactacagcccgtccttccaaggccacgtcaccatctcagctgacaagtccatcagcactgcctacctgcagtggagcagcctgaaggcctcggacaccgccatgtattactgt

SEQ ID NO: 497 - DNA, 114 bp, synthetic construct
  misc_feature 1..114: note = Description of sequence: Sequence Name: 71281-25
  source 1..114: mol_type = other DNA
ctctacgcagactccgtgaagggccggttcaccatctccagagacaattccaagaacacgctgtatctgcaaatgaaaagcctgagagccgaggacacggccgtatattactgt

SEQ ID NO: 498 - DNA, 114 bp, synthetic construct
  misc_feature 1..114: note = Description of sequence: Sequence Name: 71281-26
  source 1..114: mol_type = other DNA
tactacgcagactccgtgaagggccggttcaccatctccagagacaattccatgaacacactatatctgcaaatgaacagcctgagagccgaggacacggccgtttattactgt

SEQ ID NO: 499 - DNA, 114 bp, synthetic construct
  misc_feature 1..114: note = Description of sequence: Sequence Name: 71281-27
  source 1..114: mol_type = other DNA
tactacaacccgtccctcaagagtcgagtcaccatatccgtagacacgtccaagagccagttttccctggagctgagctctgtgaccgccgcagacacggctgtatattactgt

SEQ ID NO: 500 - DNA, 114 bp, synthetic construct
  misc_feature 1..114: note = Description of sequence: Sequence Name: 71281-28
  source 1..114: mol_type = other DNA
cactatgcacaaaagtttcaggacagggtcaccatgaccagggacacgtccatcagcacagtttacatggaattgagtagattgagatctgacgacacggccgtgtattactgt

SEQ ID NO: 501 - DNA, 114 bp, synthetic construct
  misc_feature 1..114: note = Description of sequence: Sequence Name: 71281-29
  source 1..114: mol_type = other DNA
aattacagcccgtccttccaaggccacgtcaccatctcagctgacaagtccatcagcactgcctacctgcagtggagtagcctgaaggcctcggacaccgccatgtactactgt

SEQ ID NO: 502 - DNA, 114 bp, synthetic construct
  misc_feature 1..114: note = Description of sequence: Sequence Name: 71281-30
  source 1..114: mol_type = other DNA
aattacgcagtctctgtgaagggccggttcaccatttctagagacaacgacaacaactcagtgcatctgcaattgaacggcctgagagtagacgacacggccgtgtattattgt

SEQ ID NO: 503 - DNA, 114 bp, synthetic construct
  misc_feature 1..114: note = Description of sequence: Sequence Name: 71281-31
  source 1..114: mol_type = other DNA
tactatgcagactccgtgaagggccgattcaccatctccagagacaattccaagaacacgctgtatctgcaaatggacagcctgagaactgaggacacggctgtgtattactgt

SEQ ID NO: 504 - DNA, 114 bp, synthetic construct
  misc_feature 1..114: note = Description of sequence: Sequence Name: 71281-32
  source 1..114: mol_type = other DNA
cgctacagtccatctctgaagagcaggctcaccatcaccaaggacacctccaaaaacctggtggtccttacaatgaccaacatggaccctgtggacacagccacatattactgt

SEQ ID NO: 505 - DNA, 114 bp, synthetic construct
  misc_feature 1..114: note = Description of sequence: Sequence Name: 71281-33
  source 1..114: mol_type = other DNA
ttctacgcagattccgtgaagggccgattcaccatctccagagacaattccaagaacacattgtatcttcaaatgaacagcctgagaattgaggacacggctgtgtattactgt

SEQ ID NO: 506 - DNA, 114 bp, synthetic construct
  misc_feature 1..114: note = Description of sequence: Sequence Name: 71281-34
  source 1..114: mol_type = other DNA
taccagagagactccctgaaggaccgattgaccgtctccagagacaactccaggagcacagtgtttctggaaatgaacagcctgagagcagaggacacgggtgtgtattactgt

SEQ ID NO: 507 - DNA, 114 bp, synthetic construct
  misc_feature 1..114: note = Description of sequence: Sequence Name: 71281-35
  source 1..114: mol_type = other DNA
tactacgcagactccgtgaagggccgattcaccatctccagagacaattccaagaacacgctgtatcttcaaatgatcagcctgagggccgaggacacggccgtatattactgt

SEQ ID NO: 508 - DNA, 114 bp, synthetic construct
  misc_feature 1..114: note = Description of sequence: Sequence Name: 71281-36
  source 1..114: mol_type = other DNA
atctacgcacagagattccaggaaagagtcaccattaccagggacatgtccacaaacacagcctatatggagctgagcagcctgagatccgaggacacggccgtgtattactgt

SEQ ID NO: 509 - DNA, 114 bp, synthetic construct
  misc_feature 1..114: note = Description of sequence: Sequence Name: 71281-37
  source 1..114: mol_type = other DNA
tactatgcagactccgtgaagggccgattcaccatctccagagacaattccaagaacacgctgtggcttcaaatgaacagcctgagagccgaggacacggccgtctatttctgt

SEQ ID NO: 510 - DNA, 114 bp, synthetic construct
  misc_feature 1..114: note = Description of sequence: Sequence Name: 71281-38
  source 1..114: mol_type = other DNA
acctatgcccaggacttcacaggacggtttgtcttctccttggatacctctgtcaacacggcatatctgcagatcagcagcctaaaggctgaagacactgccgtgtattactgt

SEQ ID NO: 511 - DNA, 114 bp, synthetic construct
  misc_feature 1..114: note = Description of sequence: Sequence Name: 71281-39
  source 1..114: mol_type = other DNA
cagtacgcagactccgtgaagggccgtttcaccatctccagagacaattccaacaacacgctgtatctgcaaatgttcagcctgagaactgaagacacggctgtatattactgt

SEQ ID NO: 512 - DNA, 114 bp, synthetic construct
  misc_feature 1..114: note = Description of sequence: Sequence Name: 71282-1
  source 1..114: mol_type = other DNA
tactacgcagactccgtgaagggccggttcaccatctccagagacaattccaagaacacgctctatctgcaaatgaacagcctgagagccgaggacacggccgtatattactgt

SEQ ID NO: 513 - DNA, 114 bp, synthetic construct
  misc_feature 1..114: note = Description of sequence: Sequence Name: 71282-2
  source 1..114: mol_type = other DNA
tactacgcagactccgtgaagggccgattcaccatctccagagacaattccagggacacgctgtatctgcagatgaacagcctcagagccgaggacacggccgtgtattactgt

SEQ ID NO: 514 - DNA, 111 bp, synthetic construct
  misc_feature 1..111: note = Description of sequence: Sequence Name: 71282-3
  source 1..111: mol_type = other DNA
tactacaacccgtccctcgggaatcgagtcaccatctccgtagacacgtcgaagcagttctccctgaaactgagctcagtgaccgccgcagacacggctgtgttttactgt

SEQ ID NO: 515 - DNA, 114 bp, synthetic construct
  misc_feature 1..114: note = Description of sequence: Sequence Name: 71282-4
  source 1..114: mol_type = other DNA
aactacgcacagaagtttcagggcagagtcacgattaccgcggacgagtccacgagcacagtctacatggacctgagcagcctgagatctgaggacacggccgtgtattactgt

SEQ ID NO: 516 - DNA, 114 bp, synthetic construct
  misc_feature 1..114: note = Description of sequence: Sequence Name: 71282-5
  source 1..114: mol_type = other DNA
ttctacgcagactccgtgaggggccggttcaccctctccagagacaattccaagaacaccctgtatctgcaaatgaacagcctgagagccgaggacacagccgtgtattactgt

SEQ ID NO: 517 - DNA, 114 bp, synthetic construct
  misc_feature 1..114: note = Description of sequence: Sequence Name: 71282-6
  source 1..114: mol_type = other DNA
tactacgcagactctgtgaagggccgattcaccatcttcagagacaacgccaagaattcactctatctgcaaatgaacagcctgagagccgaggacacggctgtgtactactgt

SEQ ID NO: 518 - DNA, 114 bp, synthetic construct
  misc_feature 1..114: note = Description of sequence: Sequence Name: 71282-7
  source 1..114: mol_type = other DNA
tactacgcagactccgtgaagggccgattcaccatgtccagagacaattcccagaacacgttgtatctgcagatgaacagcctgagagttgaggacacggctgtgtattactgt

SEQ ID NO: 519 - DNA, 114 bp, synthetic construct
  misc_feature 1..114: note = Description of sequence: Sequence Name: 71282-8
  source 1..114: mol_type = other DNA
tactctgtggactctgtgaagggccgattcaccatctccagagacaacaccaaaaattcactgtatctgcacatgaacagcctgagagtcgaggacacggccgtgtattactgt

SEQ ID NO: 520 - DNA, 114 bp, synthetic construct
  misc_feature 1..114: note = Description of sequence: Sequence Name: 71282-9
  source 1..114: mol_type = other DNA
tactacgcagactcagtgaagggccgattcaccatctccagagacaacgccaagaactctctgtatctgcaaatgaacagcctgagagccgaggacacggctgtgtattactgt

SEQ ID NO: 521 - DNA, 114 bp, synthetic construct
  misc_feature 1..114: note = Description of sequence: Sequence Name: 71282-10
  source 1..114: mol_type = other DNA
tactacacagactccgtgaggggccgattcaccatctccagagacaattccaagaacacgctgtatctccaaatgaacggcctgagaggtgatgacacggctgtttattactgt

SEQ ID NO: 522 - DNA, 114 bp, synthetic construct
  misc_feature 1..114: note = Description of sequence: Sequence Name: 71282-11
  source 1..114: mol_type = other DNA
tactacgcagactccgtgaagggccgattcaccatctccagacacaattccaagaacacgctgtatcttcaaatgaacagcctgagagctgaggacacggccgtgtattactgt

SEQ ID NO: 523 - DNA, 114 bp, synthetic construct
  misc_feature 1..114: note = Description of sequence: Sequence Name: 71282-12
  source 1..114: mol_type = other DNA
aactacgcacagaaattccagggcagagtcacgattaccgcggacgaatccacgagcacagcctacatggaggtgagcagcctgagatctgaggacacggccgtgtattactgt

SEQ ID NO: 524 - DNA, 114 bp, synthetic construct
  misc_feature 1..114: note = Description of sequence: Sequence Name: 71282-13
  source 1..114: mol_type = other DNA
tactacgcaggctccgtgaagggcagattcaccatctccagagacaattccgagaacacgctgtatcttcaaatgaatggtctgagagccgaggacacggctgtatattactgt

SEQ ID NO: 525 - DNA, 114 bp, synthetic construct
  misc_feature 1..114: note = Description of sequence: Sequence Name: 71282-14
  source 1..114: mol_type = other DNA
tactatgcagactccgtgaagggccgattcaccatctccagagacaattccaagaacacgctgtatctgcagatgaacagcctgagagctgaggacacggctgtgtattactgt

SEQ ID NO: 526 - DNA, 114 bp, synthetic construct
  misc_feature 1..114: note = Description of sequence: Sequence Name: 71282-15
  source 1..114: mol_type = other DNA
tattatgcagactccgtgaagggccggttcaccgtctcgagagacaattccaaaaacacagtgtttctgcagatgaaccgcctgagagccgaggacgcggccgtgtattactgt

SEQ ID NO: 527 - DNA, 114 bp, synthetic construct
  misc_feature 1..114: note = Description of sequence: Sequence Name: 71282-16
  source 1..114: mol_type = other DNA
gtaaaatcacggaaactgcaagacagactcagcattaccaaggacacatccgcgaacacagtctacatggagttgagcagcctgacatcggaagacacggctgtctattactgt

SEQ ID NO: 528 - DNA, 114 bp, synthetic construct
  misc_feature 1..114: note = Description of sequence: Sequence Name: 71282-17
  source 1..114: mol_type = other DNA
gggtacgcacagaagtttcagggcagagtcaccatgaccagggacacgaccacgaatacactctacatggagatgaacagcctgacatctgaggacacggccgtctattattgc

SEQ ID NO: 529 - DNA, 114 bp, synthetic construct
  misc_feature 1..114: note = Description of sequence: Sequence Name: 71282-18
  source 1..114: mol_type = other DNA
aactacaacccctccctcaagagtcgagtcaccatatcagtagacacgtccaagaaccagttctccctgaagctgagctctgtgaccgccgcagacacggccgtgtattattgt

SEQ ID NO: 530 - DNA, 114 bp, synthetic construct
  misc_feature 1..114: note = Description of sequence: Sequence Name: 71282-19
  source 1..114: mol_type = other DNA
tattatgtggactctgtgaggggccgattcaccatctccagagacaacgccaagaattcattgtatttgcaaatgaacagcctgagagccgaggacacggccgtgtatttctgt

SEQ ID NO: 531 - DNA, 114 bp, synthetic construct
  misc_feature 1..114: note = Description of sequence: Sequence Name: 71282-20
  source 1..114: mol_type = other DNA
cgctacagcccatctctgaagagcaggctcaccatcaccaaggacacctccaaaaaccaggtggtccttacaatgaccaacatggaccctgtggacacagccacttactactgt

SEQ ID NO: 532 - DNA, 34 bp, synthetic construct
  misc_feature 1..34: note = Description of sequence: Sequence Name: 71281-1
  source 1..34: mol_type = other DNA
tggggccagggaaccctggtcaccgtctcctcag

SEQ ID NO: 533 - DNA, 34 bp, synthetic construct
  misc_feature 1..34: note = Description of sequence: Sequence Name: 71281-2
  source 1..34: mol_type = other DNA
tggggccggggagtccctgtcaccgtctcctccg

SEQ ID NO: 534 - DNA, 34 bp, synthetic construct; identical to SEQ ID NO: 532
  misc_feature 1..34: note = Description of sequence: Sequence Name: 71281-3
  source 1..34: mol_type = other DNA

SEQ ID NO: 535 - DNA, 34 bp, synthetic construct; identical to SEQ ID NO: 532
  misc_feature 1..34: note = Description of sequence: Sequence Name: 71281-4
  source 1..34: mol_type = other DNA

SEQ ID NO: 536 - DNA, 34 bp, synthetic construct
  misc_feature 1..34: note = Description of sequence: Sequence Name: 71281-5
  source 1..34: mol_type = other DNA
tggggccagggaaccctggtcaccgtctcttcag

SEQ ID NO: 537 - DNA, 34 bp, synthetic construct
  misc_feature 1..34: note = Description of sequence: Sequence Name: 71281-6
  source 1..34: mol_type = other DNA
tggggccaagggaccacggtcaccgtctcctcag

SEQ ID NO: 538 - DNA, 34 bp, synthetic construct; identical to SEQ ID NO: 532
  misc_feature 1..34: note = Description of sequence: Sequence Name: 71281-7
  source 1..34: mol_type = other DNA

SEQ ID NO: 539 - DNA, 34 bp, synthetic construct
  misc_feature 1..34: note = Description of sequence: Sequence Name: 71281-8
  source 1..34: mol_type = other DNA
tggggccagggaaccctggtctccgtctcctcag

SEQ ID NO: 540 - DNA, 34 bp, synthetic construct; identical to SEQ ID NO: 537
  misc_feature 1..34: note = Description of sequence: Sequence Name: 71281-9
  source 1..34: mol_type = other DNA

SEQ ID NO: 541 - DNA, 34 bp, synthetic construct; identical to SEQ ID NO: 532
  misc_feature 1..34: note = Description of sequence: Sequence Name: 71281-10
  source 1..34: mol_type = other DNA

SEQ ID NO: 542 - DNA, 34 bp, synthetic construct
  misc_feature 1..34: note = Description of sequence: Sequence Name: 71281-11
  source 1..34: mol_type = other DNA
tggggccagggaaccctggtcaccgtctcctcaa

SEQ ID NO: 543 - DNA, 34 bp, synthetic construct
  misc_feature 1..34: note = Description of sequence: Sequence Name: 71281-12
  source 1..34: mol_type = other DNA
tggggccagggaaccctggtcatcgtctcctcag

SEQ ID NO: 544 - DNA, 34 bp, synthetic construct
  misc_feature 1..34: note = Description of sequence: Sequence Name: 71281-13
  source 1..34: mol_type = other DNA
tggggccagggaaccctggtcgccgtctcctcag

SEQ ID NO: 545 - DNA, 34 bp, synthetic construct; identical to SEQ ID NO: 532
  misc_feature 1..34: note = Description of sequence: Sequence Name: 71281-14
  source 1..34: mol_type = other DNA

SEQ ID NO: 546 - DNA, 33 bp, synthetic construct
  misc_feature 1..33: note = Description of sequence: Sequence Name: 71281-15
  source 1..33: mol_type = other DNA
tggggcctagggaccacggtcaccgtctcctca

SEQ ID NO: 547 - DNA, 34 bp, synthetic construct; identical to SEQ ID NO: 532
  misc_feature 1..34: note = Description of sequence: Sequence Name: 71281-16
  source 1..34: mol_type = other DNA

SEQ ID NO: 548 - DNA, 34 bp, synthetic construct; identical to SEQ ID NO: 537
  misc_feature 1..34: note = Description of sequence: Sequence Name: 71281-17
  source 1..34: mol_type = other DNA

SEQ ID NO: 549 - DNA, 34 bp, synthetic construct
  misc_feature 1..34: note = Description of sequence: Sequence Name: 71281-18
  source 1..34: mol_type = other DNA
tggggccagggaacgtcggtcaccgtctcctcaa

SEQ ID NO: 550 - DNA, 33 bp, synthetic construct
  misc_feature 1..33: note = Description of sequence: Sequence Name: 71281-19
  source 1..33: mol_type = other DNA
tggggccaagggtccacggtcaccgtctcctca

SEQ ID NO: 551 - DNA, 34 bp, synthetic construct; identical to SEQ ID NO: 532
  misc_feature 1..34: note = Description of sequence: Sequence Name: 71281-20
  source 1..34: mol_type = other DNA

SEQ ID NO: 552 - DNA, 33 bp, synthetic construct
  misc_feature 1..33: note = Description of sequence: Sequence Name: 71281-21
  source 1..33: mol_type = other DNA
tggggcaaagggaccacggtcaccgtctcctca

SEQ ID NO: 553 - DNA, 33 bp, synthetic construct
  misc_feature 1..33: note = Description of sequence: Sequence Name: 71281-22
  source 1..33: mol_type = other DNA
tggggccaagggaccacggtcaccgtctcctca

SEQ ID NO: 554 - DNA, 34 bp, synthetic construct
  misc_feature 1..34: note = Description of sequence: Sequence Name: 71281-23
  source 1..34: mol_type = other DNA
tggggccagggaatcctggtcaccgtctcctcag

SEQ ID NO: 555 - DNA, 34 bp, synthetic construct
  misc_feature 1..34: note = Description of sequence: Sequence Name: 71281-24
  source 1..34: mol_type = other DNA
tggggccaagggacaatggtcaccgtctcttcag

SEQ ID NO: 556 - DNA, 34 bp, synthetic construct; identical to SEQ ID NO: 532
  misc_feature 1..34: note = Description of sequence: Sequence Name: 71281-25
  source 1..34: mol_type = other DNA

SEQ ID NO: 557 - DNA, 34 bp, synthetic construct
  misc_feature 1..34: note = Description of sequence: Sequence Name: 71281-26
  source 1..34: mol_type = other DNA
tggggccgtggcaccctggtcactgtctcctcag

SEQ ID NO: 558 - DNA, 34 bp, synthetic construct; identical to SEQ ID NO: 555
  misc_feature 1..34: note = Description of sequence: Sequence Name: 71281-27
  source 1..34: mol_type = other DNA

SEQ ID NO: 559 - DNA, 33 bp, synthetic construct
  misc_feature 1..33: note = Description of sequence: Sequence Name: 71281-28
  source 1..33: mol_type = other DNA
tggggcaaagggaccacggtcatcgtctcctca

SEQ ID NO: 560 - DNA, 33 bp, synthetic construct; identical to SEQ ID NO: 553
  misc_feature 1..33: note = Description of sequence: Sequence Name: 71281-29
  source 1..33: mol_type = other DNA

SEQ ID NO: 561 - DNA, 34 bp, synthetic construct; identical to SEQ ID NO: 532
  misc_feature 1..34: note = Description of sequence: Sequence Name: 71281-30
  source 1..34: mol_type = other DNA

SEQ ID NO: 562 - DNA, 34 bp, synthetic construct; identical to SEQ ID NO: 532
  misc_feature 1..34: note = Description of sequence: Sequence Name: 71281-31
  source 1..34: mol_type = other DNA

SEQ ID NO: 563 - DNA, 34 bp, synthetic construct
  misc_feature 1..34: note = Description of sequence: Sequence Name: 71281-32
  source 1..34: mol_type = other DNA
tggggccagggagccctggtcaccgtctcctcag

SEQ ID NO: 564 - DNA, 34 bp, synthetic construct; identical to SEQ ID NO: 536
  misc_feature 1..34: note = Description of sequence: Sequence Name: 71281-33
  source 1..34: mol_type = other DNA

SEQ ID NO: 565 - DNA, 34 bp, synthetic construct; identical to SEQ ID NO: 532
  misc_feature 1..34: note = Description of sequence: Sequence Name: 71281-34
  source 1..34: mol_type = other DNA

SEQ ID NO: 566 - DNA, 34 bp, synthetic construct; identical to SEQ ID NO: 532
  misc_feature 1..34: note = Description of sequence: Sequence Name: 71281-35
  source 1..34: mol_type = other DNA

SEQ ID NO: 567 - DNA, 34 bp, synthetic construct
  misc_feature 1..34: note = Description of sequence: Sequence Name: 71281-36
  source 1..34: mol_type = other DNA
tggggccaagggacacaggtcaccgtctcttcag

SEQ ID NO: 568 - DNA, 34 bp, synthetic construct; identical to SEQ ID NO: 532
  misc_feature 1..34: note = Description of sequence: Sequence Name: 71281-37
  source 1..34: mol_type = other DNA

SEQ ID NO: 569 - DNA, 33 bp, synthetic construct; identical to SEQ ID NO: 553
  misc_feature 1..33: note = Description of sequence: Sequence Name: 71281-38
  source 1..33: mol_type = other DNA

SEQ ID NO: 570 - DNA, 33 bp, synthetic construct; identical to SEQ ID NO: 553
  misc_feature 1..33: note = Description of sequence: Sequence Name: 71281-39
  source 1..33: mol_type = other DNA

SEQ ID NO: 571 - DNA, 34 bp, synthetic construct; identical to SEQ ID NO: 532
  misc_feature 1..34: note = Description of sequence: Sequence Name: 71282-1
  source 1..34: mol_type = other DNA

SEQ ID NO: 572 - DNA, 34 bp, synthetic construct; identical to SEQ ID NO: 532
  misc_feature 1..34: note = Description of sequence: Sequence Name: 71282-2
  source 1..34: mol_type = other DNA

SEQ ID NO: 573 - DNA, 34 bp, synthetic construct; identical to SEQ ID NO: 532
  misc_feature 1..34: note = Description of sequence: Sequence Name: 71282-3
  source 1..34: mol_type = other DNA

SEQ ID NO: 574 - DNA, 34 bp, synthetic construct; identical to SEQ ID NO: 532
  misc_feature 1..34: note = Description of sequence: Sequence Name: 71282-4
  source 1..34: mol_type = other DNA

SEQ ID NO: 575 - DNA, 34 bp, synthetic construct
  misc_feature 1..34: note = Description of sequence: Sequence Name: 71282-5
  source 1..34: mol_type = other DNA
tggggccagggacgcctggtcaccgtctcctcag

SEQ ID NO: 576 - DNA, 34 bp, synthetic construct; identical to SEQ ID NO: 555
  misc_feature 1..34: note = Description of sequence: Sequence Name: 71282-6
  source 1..34: mol_type = other DNA

SEQ ID NO: 577 - DNA, 34 bp, synthetic construct; identical to SEQ ID NO: 532
  misc_feature 1..34: note = Description of sequence: Sequence Name: 71282-7
  source 1..34: mol_type = other DNA

SEQ ID NO: 578 - DNA, 34 bp, synthetic construct; identical to SEQ ID NO: 543
  misc_feature 1..34: note = Description of sequence: Sequence Name: 71282-8
  source 1..34: mol_type = other DNA

SEQ ID NO: 579 - DNA, 34 bp, synthetic construct
  misc_feature 1..34: note = Description of sequence: Sequence Name: 71282-9
  source 1..34: mol_type = other DNA
tggggccagggaaccctcgtcaccgtctcgtcag

SEQ ID NO: 580 - DNA, 34 bp, synthetic construct
  misc_feature 1..34: note = Description of sequence: Sequence Name: 71282-10
  source 1..34: mol_type = other DNA
tggggccaagggacaatcgtcaccgtctcttcag

SEQ ID NO: 581 - DNA, 33 bp, synthetic construct; identical to SEQ ID NO: 553
  misc_feature 1..33: note = Description of sequence: Sequence Name: 71282-11
  source 1..33: mol_type = other DNA

SEQ ID NO: 582 - DNA, 34 bp, synthetic construct; identical to SEQ ID NO: 532
  misc_feature 1..34: note = Description of sequence: Sequence Name: 71282-12
  source 1..34: mol_type = other DNA

SEQ ID NO: 583 - DNA, 34 bp, synthetic construct
  misc_feature 1..34: note = Description of sequence: Sequence Name: 71282-13
  source 1..34: mol_type = other DNA
tggggccaagggacgatggtcaccgtcgctccag

SEQ ID NO: 584 - DNA, 34 bp, synthetic construct
  misc_feature 1..34: note = Description of sequence: Sequence Name: 71282-14
  source 1..34: mol_type = other DNA
tggggccagggatccctggtcaccgtcgcctcag

SEQ ID NO: 585 - DNA, 34 bp, synthetic construct
  misc_feature 1..34: note = Description of sequence: Sequence Name: 71282-15
  source 1..34: mol_type = other DNA
tggggccagggaacccgggtcaccgtctccccag

SEQ ID NO: 586 - DNA, 34 bp, synthetic construct
  misc_feature 1..34: note = Description of sequence: Sequence Name: 71282-16
  source 1..34: mol_type = other DNA
tggggcccggggaccctggtcaccgtctcctcag

SEQ ID NO: 587 - DNA, 34 bp, synthetic construct; identical to SEQ ID NO: 532
  misc_feature 1..34: note = Description of sequence: Sequence Name: 71282-17
  source 1..34: mol_type = other DNA

SEQ ID NO: 588 - DNA, 34 bp, synthetic construct; identical to SEQ ID NO: 555
  misc_feature 1..34: note = Description of sequence: Sequence Name: 71282-18
  source 1..34: mol_type = other DNA

SEQ ID NO: 589 - DNA, 34 bp, synthetic construct
  misc_feature 1..34: note = Description of sequence: Sequence Name: 71282-19
  source 1..34: mol_type = other DNA
tggggccgtggcaccttggtcactgtcgtgccag

SEQ ID NO: 590 - DNA, 34 bp, synthetic construct; identical to SEQ ID NO: 532
  misc_feature 1..34: note = Description of sequence: Sequence Name: 71282-20
  source 1..34: mol_type = other DNA

SEQ ID NO: 591 - DNA, 24 bp, synthetic construct
  misc_feature 1..24: note = Description of sequence: Sequence Name: 71281-1
  source 1..24: mol_type = other DNA
gaattcacgtttagcacctatgcc

SEQ ID NO: 592 - DNA, 24 bp, synthetic construct
  misc_feature 1..24: note = Description of sequence: Sequence Name: 71281-2
  source 1..24: mol_type = other DNA
ggattcacatttaccagttatgtt

SEQ ID NO: 593 - DNA, 24 bp, synthetic construct
  misc_feature 1..24: note = Description of sequence: Sequence Name: 71281-3
  source 1..24: mol_type = other DNA
ggattaacctttagtatttattgg

SEQ ID NO: 594 - DNA, 24 bp, synthetic construct
  misc_feature 1..24: note = Description of sequence: Sequence Name: 71281-4
  source 1..24: mol_type = other DNA
ggattcaccttcagtaactatgct

SEQ ID NO: 595 - DNA, 24 bp, synthetic construct
  misc_feature 1..24: note = Description of sequence: Sequence Name: 71281-5
  source 1..24: mol_type = other DNA
ggattcacctttaacaactatgcc

SEQ ID NO: 596 - DNA, 24 bp, synthetic construct
  misc_feature 1..24: note = Description of sequence: Sequence Name: 71281-6
  source 1..24: mol_type = other DNA
ggattcaccttcagtacttatggc

SEQ ID NO: 597 - DNA, 24 bp, synthetic construct
  misc_feature 1..24: note = Description of sequence: Sequence Name: 71281-7
  source 1..24: mol_type = other DNA
ggattcatctttagtcattatgac

SEQ ID NO: 598 - DNA, 30 bp, synthetic construct
  misc_feature 1..30: note = Description of sequence: Sequence Name: 71281-8
  source 1..30: mol_type = other DNA
ggtggctccatcagcagtagtagttactac

SEQ ID NO: 599 - DNA, 24 bp, synthetic construct
  misc_feature 1..24: note = Description of sequence: Sequence Name: 71281-9
  source 1..24: mol_type = other DNA
gaattcaactttgtcaactactgg

SEQ ID NO: 600 - DNA, 24 bp, synthetic construct
  misc_feature 1..24: note = Description of sequence: Sequence Name: 71281-10
  source 1..24: mol_type = other DNA
ggattcatttttagtgactcttgg

SEQ ID NO: 601 - DNA, 24 bp, synthetic construct
  misc_feature 1..24: note = Description of sequence: Sequence Name: 71281-11
  source 1..24: mol_type = other DNA
ggcggcaccctcagcacctatact

SEQ ID NO: 602 - DNA, 30 bp, synthetic construct
  misc_feature 1..30: note = Description of sequence: Sequence Name: 71281-12
  source 1..30: mol_type = other DNA
ggtgactccatcagcagtagtaattactac

SEQ ID NO: 603 - DNA, 24 bp, synthetic construct
  misc_feature 1..24: note = Description of sequence: Sequence Name: 71281-13
  source 1..24: mol_type = other DNA
ggttacagtttcaccagttatggc

SEQ ID NO: 604 - DNA, 24 bp, synthetic construct
  misc_feature 1..24: note = Description of sequence: Sequence Name: 71281-14
  source 1..24: mol_type = other DNA
ggattcaccttcactgactactac

SEQ ID NO: 605 - DNA, 24 bp, synthetic construct
  misc_feature 1..24: note = Description of sequence: Sequence Name: 71281-15
  source 1..24: mol_type = other DNA
gattccactttcattaacgcctgg

SEQ ID NO: 606 - DNA, 24 bp, synthetic construct
  misc_feature 1..24: note = Description of sequence: Sequence Name: 71281-16
  source 1..24: mol_type = other DNA
gggttcaccttcagtggctctgct

SEQ ID NO: 607 - DNA, 24 bp, synthetic construct
  misc_feature 1..24: note = Description of sequence: Sequence Name: 71281-17
  source 1..24: mol_type = other DNA
ggattcaccttcagtgcctactgg

SEQ ID NO: 608 - DNA, 24 bp, synthetic construct
  misc_feature 1..24: note = Description of sequence: Sequence Name: 71281-18
  source 1..24: mol_type = other DNA
gggttcaccgtcggtagcaactac

SEQ ID NO: 609 - DNA, 24 bp, synthetic construct
  misc_feature 1..24: note = Description of sequence: Sequence Name: 71281-19
  source 1..24: mol_type = other DNA
ggatacaccttcaccggctactat

SEQ ID NO: 610 - DNA, 24 bp, synthetic construct
  misc_feature 1..24: note = Description of sequence: Sequence Name: 71281-20
  source 1..24: mol_type = other DNA
ggatttcccttcactacctactgg

SEQ ID NO: 611 - DNA, 30 bp, synthetic construct
  misc_feature 1..30: note = Description of sequence: Sequence Name: 71281-21
  source 1..30: mol_type = other DNA
ggtggttccatccgcagtagtgattactac

SEQ ID NO: 612 - DNA, 30 bp, synthetic construct
  misc_feature 1..30: note = Description of sequence: Sequence Name: 71281-22
  source 1..30: mol_type = other DNA
ggtgactccatcagcagtggtggttactac

SEQ ID NO: 613 - DNA, 27 bp, synthetic construct
  misc_feature 1..27: note = Description of sequence: Sequence Name: 71281-23
  source 1..27: mol_type = other DNA
ggtgactccatcagtagtagtgactgg

SEQ ID NO: 614 - DNA, 24 bp, synthetic construct
  misc_feature 1..24: note = Description of sequence: Sequence Name: 71281-24
  source 1..24: mol_type = other DNA
ggatacagctttaccacctactgg

SEQ ID NO: 615 - DNA, 24 bp, synthetic construct
  misc_feature 1..24: note = Description of sequence: Sequence Name: 71281-25
  source 1..24: mol_type = other DNA
ggattcacctttagcagctatgcc

SEQ ID NO: 616 - DNA, 24 bp, synthetic construct
  misc_feature 1..24: note = Description of sequence: Sequence Name: 71281-26
  source 1..24: mol_type = other DNA
ggattcgcctttagcaactatgcc

SEQ ID NO: 617 - DNA, 30 bp, synthetic construct; identical to SEQ ID NO: 598
  misc_feature 1..30: note = Description of sequence: Sequence Name: 71281-27
  source 1..30: mol_type = other DNA

SEQ ID NO: 618 - DNA, 24 bp, synthetic construct
  misc_feature 1..24: note = Description of sequence: Sequence Name: 71281-28
  source 1..24: mol_type = other DNA
ggatacagttttaacgcctactat

SEQ ID NO: 619 - DNA, 24 bp, synthetic construct
  misc_feature 1..24: note = Description of sequence: Sequence Name: 71281-29
  source 1..24: mol_type = other DNA
ggatacagctttaccagctactgg

SEQ ID NO: 620 - DNA, 24 bp, synthetic construct
  misc_feature 1..24: note = Description of sequence: Sequence Name: 71281-30
  source 1..24: mol_type = other DNA
ggattcgctttcagtgacgattac

SEQ ID NO: 621 - DNA, 24 bp, synthetic construct
  misc_feature 1..24: note = Description of sequence: Sequence Name: 71281-31
  source 1..24: mol_type = other DNA
ggattcaccttcagtcgctatggc

SEQ ID NO: 622 - DNA, 30 bp, synthetic construct
  misc_feature 1..30: note = Description of sequence: Sequence Name: 71281-32
  source 1..30: mol_type = other DNA
gggttctcactcagcactagtggagtgggt

SEQ ID NO: 623 - DNA, 24 bp, synthetic construct
  misc_feature 1..24: note = Description of sequence: Sequence Name: 71281-33
  source 1..24: mol_type = other DNA
gaaatcatcgtcagtgtcaactat

SEQ ID NO: 624 - DNA, 24 bp, synthetic construct
  misc_feature 1..24: note = Description of sequence: Sequence Name: 71281-34
  source 1..24: mol_type = other DNA
gggttcaatttcagttactctgct

SEQ ID NO: 625 - DNA, 24 bp, synthetic construct
  misc_feature 1..24: note = Description of sequence: Sequence Name: 71281-35
  source 1..24: mol_type = other DNA
gggttcaccgtcagtcgcaactac

SEQ ID NO: 626 - DNA, 24 bp, synthetic construct
  misc_feature 1..24: note = Description of sequence: Sequence Name: 71281-36
  source 1..24: mol_type = other DNA
gggttcaccttttttacctcttct

SEQ ID NO: 627 - DNA, 24 bp, synthetic construct
  misc_feature 1..24: note = Description of sequence: Sequence Name: 71281-37
  source 1..24: mol_type = other DNA
gggttcaccgtcagtagtaactac

SEQ ID NO: 628 - DNA, 24 bp, synthetic construct
  misc_feature 1..24: note = Description of sequence: Sequence Name: 71281-38
  source 1..24: mol_type = other DNA
ggatacaccttcactaggtatgct

SEQ ID NO: 629 - DNA, 24 bp, synthetic construct
  misc_feature 1..24: note = Description of sequence: Sequence Name: 71281-39
  source 1..24: mol_type = other DNA
ggattcaccttcagtacctatgct

SEQ ID NO: 630 - DNA, 24 bp, synthetic construct
  misc_feature 1..24: note = Description of sequence: Sequence Name: 71282-1
  source 1..24: mol_type = other DNA
ggattcacctttagcagctatgcc

SEQ ID NO: 631 - DNA, 24 bp, synthetic construct
  misc_feature 1..24: note = Description of sequence: Sequence Name: 71282-2
  source 1..24: mol_type = other DNA
ggattcacctttagcagctatccc

SEQ ID NO: 632 - DNA, 30 bp, synthetic construct
  misc_feature 1..30: note = Description of sequence: Sequence Name: 71282-3
  source 1..30: mol_type = other DNA
ggtggctccatcagaactactagttattac

SEQ ID NO: 633 - DNA, 24 bp, synthetic construct
  misc_feature 1..24: note = Description of sequence: Sequence Name: 71282-4
  source 1..24: mol_type = other DNA
ggaggcaccttcagcacctctgct

SEQ ID NO: 634 - DNA, 24 bp, synthetic construct
  misc_feature 1..24: note = Description of sequence: Sequence Name: 71282-5
  source 1..24: mol_type = other DNA
ggattcacctttagcagctatgcc

SEQ ID NO: 635 - DNA, 24 bp, synthetic construct
  misc_feature 1..24: note = Description of sequence: Sequence Name: 71282-6
  source 1..24: mol_type = other DNA
ggattcaccttcagtagttatagt

SEQ ID NO: 636 - DNA, 24 bp, synthetic construct
  misc_feature 1..24: note = Description of sequence: Sequence Name: 71282-7
  source 1..24: mol_type = other DNA
ggattcaccttcagaagtcatagt

SEQ ID NO: 637 - DNA, 24 bp, synthetic construct
  misc_feature 1..24: note = Description of sequence: Sequence Name: 71282-8
  source 1..24: mol_type = other DNA
ggattcagccttagtagctattgg

SEQ ID NO: 638 - DNA, 24 bp, synthetic construct
  misc_feature 1..24: note = Description of sequence: Sequence Name: 71282-9
  source 1..24: mol_type = other DNA
ggattcacgttcagcagctataac

SEQ ID NO: 639 - DNA, 24 bp, synthetic construct
  misc_feature 1..24: note = Description of sequence: Sequence Name: 71282-10
  source 1..24: mol_type = other DNA
ggattcaccttctatacctatgct

SEQ ID NO: 640 - DNA, 24 bp, synthetic construct
  misc_feature 1..24: note = Description of sequence: Sequence Name: 71282-11
  source 1..24: mol_type = other DNA
gggttcaccgtcagtagcaactac

SEQ ID NO: 641 - DNA, 24 bp, synthetic construct
  misc_feature 1..24: note = Description of sequence: Sequence Name: 71282-12
  source 1..24: mol_type = other DNA
ggaggcaccttcagcagctatgct

SEQ ID NO: 642 - DNA, 24 bp, synthetic construct
  misc_feature 1..24: note = Description of sequence: Sequence Name: 71282-13
  source 1..24: mol_type = other DNA
ggattcaccgtcagttccaactac

SEQ ID NO: 643 - DNA, 24 bp, synthetic construct
  misc_feature 1..24: note = Description of sequence: Sequence Name: 71282-14
  source 1..24: mol_type = other DNA
ggattcaccttcagaagctatggc

SEQ ID NO: 644 - DNA, 24 bp, synthetic construct
  misc_feature 1..24: note = Description of sequence: Sequence Name: 71282-15
  source 1..24: mol_type = other DNA
ggattcaccttcagcaactatgcc

SEQ ID NO: 645 - DNA, 24 bp, synthetic construct
  misc_feature 1..24: note = Description of sequence: Sequence Name: 71282-16
  source 1..24: mol_type = other DNA
ggatacagcataacgagccaaggc

SEQ ID NO: 646 - DNA, 24 bp, synthetic construct
  misc_feature 1..24: note = Description of sequence: Sequence Name: 71282-17
  source 1..24: mol_type = other DNA
ggatacaccttcaccgactacttc

SEQ ID NO: 647 - DNA, 24 bp, synthetic construct
  misc_feature 1..24: note = Description of sequence: Sequence Name: 71282-18
  source 1..24: mol_type = other DNA
ggtgactccatgagtcgttactac

SEQ ID NO: 648 - DNA, 24 bp, synthetic construct
  misc_feature 1..24: note = Description of sequence: Sequence Name: 71282-19
  source 1..24: mol_type = other DNA
ggattcacttttagtaactattgg

SEQ ID NO: 649 - DNA, 30 bp, synthetic construct
  misc_feature 1..30: note = Description of sequence: Sequence Name: 71282-20
  source 1..30: mol_type = other DNA
gggttctcactcaacactagtggagtgggt

SEQ ID NO: 650 - DNA, 24 bp, synthetic construct
  misc_feature 1..24: note = Description of sequence: Sequence Name: 71281-1
  source 1..24: mol_type = other DNA
attagtggtagtggcgggagcaca

SEQ ID NO: 651 - DNA, 24 bp, synthetic construct
  misc_feature 1..24: note = Description of sequence: Sequence Name: 71281-2
  source 1..24: mol_type = other DNA
atcaacccgaatacactcatcaca

SEQ ID NO: 652 - DNA, 24 bp, synthetic construct
  misc_feature 1..24: note = Description of sequence: Sequence Name: 71281-3
  source 1..24: mol_type = other DNA
ataaagcaagatggaggtgagaaa

SEQ ID NO: 653 - DNA, 24 bp, synthetic construct
  misc_feature 1..24: note = Description of sequence: Sequence Name: 71281-4
  source 1..24: mol_type = other DNA
attaatgataatgggggtagcaca

SEQ ID NO: 654 - DNA, 24 bp, synthetic construct
  misc_feature 1..24: note = Description of sequence: Sequence Name: 71281-5
  source 1..24: mol_type = other DNA
gtcagtgctagtggtggtaccaca

SEQ ID NO: 655 - DNA, 24 bp, synthetic construct
  misc_feature 1..24: note = Description of sequence: Sequence Name: 71281-6
  source 1..24: mol_type = other DNA
atatcatttgatggaagtattaaa

SEQ ID NO: 656 - DNA, 24 bp, synthetic construct
  misc_feature 1..24: note = Description of sequence: Sequence Name: 71281-7
  source 1..24: mol_type = other DNA
atgagtggtagtggtggtgctata

SEQ ID NO: 657 - DNA, 21 bp, synthetic construct
  misc_feature 1..21: note = Description of sequence: Sequence Name: 71281-8
  source 1..21: mol_type = other DNA
atctattatagtgggagcacc

SEQ ID NO: 658 - DNA, 24 bp, synthetic construct
  misc_feature 1..24: note = Description of sequence: Sequence Name: 71281-9
  source 1..24: mol_type = other DNA
atctttcctggtgactctggtacc

SEQ ID NO: 659 - DNA, 24 bp, synthetic construct
  misc_feature 1..24: note = Description of sequence: Sequence Name: 71281-10
  source 1..24: mol_type = other DNA
ataaagagtgatggaagtacgaaa

SEQ ID NO: 660 - DNA, 24 bp, synthetic construct
  misc_feature 1..24: note = Description of sequence: Sequence Name: 71281-11
  source 1..24: mol_type = other DNA
atcatccctgtttttggtacatca

SEQ ID NO: 661 - DNA, 21 bp, synthetic construct
  misc_feature 1..21: note = Description of sequence: Sequence Name: 71281-12
  source 1..21: mol_type = other DNA
atctattatagtgggaccacc

SEQ ID NO: 662 - DNA, 24 bp, synthetic construct
  misc_feature 1..24: note = Description of sequence: Sequence Name: 71281-13
  source 1..24: mol_type = other DNA
atcagcggtcacaatggtaacaca

SEQ ID NO: 663 - DNA, 24 bp, synthetic construct
  misc_feature 1..24: note = Description of sequence: Sequence Name: 71281-14
  source 1..24: mol_type = other DNA
attagtagtagtggtgattacaca

SEQ ID NO: 664 - DNA, 30 bp, synthetic construct
  misc_feature 1..30: note = Description of sequence: Sequence Name: 71281-15
  source 1..30: mol_type = other DNA
attagaagcaagcgcgacggtgggacgaca

SEQ ID NO: 665 - DNA, 30 bp, synthetic construct
  misc_feature 1..30: note = Description of sequence: Sequence Name: 71281-16
  source 1..30: mol_type = other DNA
attagaagcaaagctaacagttacgcgaca

SEQ ID NO: 666 - DNA, 24 bp, synthetic construct
  misc_feature 1..24: note = Description of sequence: Sequence Name: 71281-17
  source 1..24: mol_type = other DNA
attaatagtgatggcagtagcgca

SEQ ID NO: 667 - DNA, 21 bp, synthetic construct
  misc_feature 1..21: note = Description of sequence: Sequence Name: 71281-18
  source 1..21: mol_type = other DNA
ctttatgccggtggaagcaca

SEQ ID NO: 668 - DNA, 24 bp, synthetic construct
  misc_feature 1..24: note = Description of sequence: Sequence Name: 71281-19
  source 1..24: mol_type = other DNA
atcaaccctaacagtggtggcaca

SEQ ID NO: 669 - DNA, 24 bp, synthetic construct
  misc_feature 1..24: note = Description of sequence: Sequence Name: 71281-20
  source 1..24: mol_type = other DNA
attaatcttgatggcagtgttaca

SEQ ID NO: 670 - DNA, 21 bp, synthetic construct
  misc_feature 1..21: note = Description of sequence: Sequence Name: 71281-21
  source 1..21: mol_type = other DNA
atctattatagtgggaccagg

SEQ ID NO: 671 - DNA, 21 bp, synthetic construct
  misc_feature 1..21: note = Description of sequence: Sequence Name: 71281-22
  source 1..21: mol_type = other DNA
atctattatggtgggaacacc

SEQ ID NO: 672 - DNA, 21 bp, synthetic construct
  misc_feature 1..21: note = Description of sequence: Sequence Name: 71281-23
  source 1..21: mol_type = other DNA
atctatcatggtgggcacacc

SEQ ID NO: 673 - DNA, 24 bp, synthetic construct
  misc_feature 1..24: note = Description of sequence: Sequence Name: 71281-24
  source 1..24: mol_type = other DNA
attgatcctagtgactcttatacc

SEQ ID NO: 674 - DNA, 24 bp, synthetic construct
  misc_feature 1..24: note = Description of sequence: Sequence Name: 71281-25
  source 1..24: mol_type = other DNA
attagtggtagtggtggtaccaca

SEQ ID NO: 675 - DNA, 24 bp, synthetic construct
  misc_feature 1..24: note = Description of sequence: Sequence Name: 71281-26
  source 1..24: mol_type = other DNA
attagttatggtggtgataacaca

SEQ ID NO: 676 - DNA, 21 bp, synthetic construct
  misc_feature 1..21: note = Description of sequence: Sequence Name: 71281-27
  source 1..21: mol_type = other DNA
atctattatcgtgggagcacc

SEQ ID NO: 677 - DNA, 24 bp, synthetic construct
  misc_feature 1..24: note = Description of sequence: Sequence Name: 71281-28
  source 1..24: mol_type = other DNA
atcaaccctcacagtggtgacata

SEQ ID NO: 678 - DNA, 24 bp, synthetic construct
  misc_feature 1..24: note = Description of sequence: Sequence Name: 71281-29
  source 1..24: mol_type = other DNA
attgatcctactgactcttatacc

SEQ ID NO: 679 - DNA, 24 bp, synthetic construct
  misc_feature 1..24: note = Description of sequence: Sequence Name: 71281-30
  source 1..24: mol_type = other DNA
attggtggtgatggcacttacaaa

SEQ ID NO: 680 - DNA, 24 bp, synthetic construct
  misc_feature 1..24: note = Description of sequence: Sequence Name: 71281-31
  source 1..24: mol_type = other DNA
atatcatatgatggtgataataaa

SEQ ID NO: 681 - DNA, 21 bp, synthetic construct
  misc_feature 1..21: note = Description of sequence: Sequence Name: 71281-32
  source 1..21: mol_type = other DNA
acttattgggatggtgatacg

SEQ ID NO: 682 - DNA, 21 bp, synthetic construct
  misc_feature 1..21: note = Description of sequence: Sequence Name: 71281-33
  source 1..21: mol_type = other DNA
atttatagcggtggtagcact

SEQ ID NO: 683 - DNA, 24 bp, synthetic construct
  misc_feature 1..24: note = Description of sequence: Sequence Name: 71281-34
  source 1..24: mol_type = other DNA
atatcatatgatggaaccagtaag

SEQ ID NO: 684 - DNA, 21 bp, synthetic construct
  misc_feature 1..21: note = Description of sequence: Sequence Name: 71281-35
  source 1..21: mol_type = other DNA
atttatagcggtggtagcaca

SEQ ID NO: 685 - DNA, 24 bp, synthetic construct
  misc_feature 1..24: note = Description of sequence: Sequence Name: 71281-36
  source 1..24: mol_type = other DNA
atcgtcgttggcagtggtaagaca

SEQ ID NO: 686 - DNA, 21 bp, synthetic construct
  misc_feature 1..21: note = Description of sequence: Sequence Name: 71281-37
  source 1..21: mol_type = other DNA
atttatcccggtggaactaca

SEQ ID NO: 687 - DNA, 24 bp, synthetic construct
  misc_feature 1..24: note = Description of sequence: Sequence Name: 71281-38
  source 1..24: mol_type = other DNA
atcaacacgaacactggaaaccca

SEQ ID NO: 688 - DNA, 24 bp, synthetic construct
  misc_feature 1..24: note = Description of sequence: Sequence Name: 71281-39
  source 1..24: mol_type = other DNA
atatcatatgatggatacaataaa

SEQ ID NO: 689 - DNA, 24 bp, synthetic construct
  misc_feature 1..24: note = Description of sequence: Sequence Name: 71282-1
  source 1..24: mol_type = other DNA
ataagtggtggtggtggtagtaca

SEQ ID NO: 690 - DNA, 15 bp, synthetic construct
  misc_feature 1..15: note = Description of sequence: Sequence Name: 71282-2
  source 1..15: mol_type = other DNA
atcactgctaccaca

SEQ ID NO: 691 - DNA, 21 bp, synthetic construct
  misc_feature 1..21: note = Description of sequence: Sequence Name: 71282-3
  source 1..21: mol_type = other DNA
atgtactatactgggagcacc

SEQ ID NO: 692 - DNA, 24 bp, synthetic construct
  misc_feature 1..24: note = Description of sequence: Sequence Name: 71282-4
  source 1..24: mol_type = other DNA
atcatccctttctttggtacacca

SEQ ID NO: 693 - DNA, 24 bp, synthetic construct
  misc_feature 1..24: note = Description of sequence: Sequence Name: 71282-5
  source 1..24: mol_type = other DNA
attagtggtgatggtgctagcaca

SEQ ID NO: 694 - DNA, 24 bp, synthetic construct
  misc_feature 1..24: note = Description of sequence: Sequence Name: 71282-6
  source 1..24: mol_type = other DNA
atcagtagtagtagcagcaccata

SEQ ID NO: 695 - DNA, 24 bp, synthetic construct
  misc_feature 1..24: note = Description of sequence: Sequence Name: 71282-7
  source 1..24: mol_type = other DNA
atatcatatgatggatacaataaa

SEQ ID NO: 696 - DNA, 24 bp, synthetic construct
  misc_feature 1..24: note = Description of sequence: Sequence Name: 71282-8
  source 1..24: mol_type = other DNA
ataaaccgagatggaagtgagaaa

SEQ ID NO: 697 - DNA, 24 bp, synthetic construct
  misc_feature 1..24: note = Description of sequence: Sequence Name: 71282-9
  source 1..24: mol_type = other DNA
attagtactagtagtgattacata

SEQ ID NO: 698 - DNA, 24 bp, synthetic construct
  misc_feature 1..24: note = Description of sequence: Sequence Name: 71282-10
  source 1..24: mol_type = other DNA
atctcatatgatggaattaataaa

SEQ ID NO: 699 - DNA, 21 bp, synthetic construct
  misc_feature 1..21: note = Description of sequence: Sequence Name: 71282-11
  source 1..21: mol_type = other DNA
atttatagcggtggtagcaca

SEQ ID NO: 700 - DNA, 24 bp, synthetic construct
  misc_feature 1..24: note = Description of sequence: Sequence Name: 71282-12
  source 1..24: mol_type = other DNA
atcatccctatctttggtacagca

SEQ ID NO: 701 - DNA, 21 bp, synthetic construct
  misc_feature 1..21: note = Description of sequence: Sequence Name: 71282-13
  source 1..21: mol_type = other DNA
atttataccggtggtagcaca

SEQ ID NO: 702 - DNA, 24 bp, synthetic construct
  misc_feature 1..24: note = Description of sequence: Sequence Name: 71282-14
  source 1..24: mol_type = other DNA
atatcatatgatggaagtaataaa

SEQ ID NO: 703 - DNA, 24 bp, synthetic construct
  misc_feature 1..24: note = Description of sequence: Sequence Name: 71282-15
  source 1..24: mol_type = other DNA
attactggtactggatataacaca

SEQ ID NO: 704 - DNA, 24 bp, synthetic construct
  misc_feature 1..24: note = Description of sequence: Sequence Name: 71282-16
  source 1..24: mol_type = other DNA
atcagccgtgacaatgacaacaca

SEQ ID NO: 705 - DNA, 24 bp, synthetic construct
  misc_feature 1..24: note = Description of sequence: Sequence Name: 71282-17
  source 1..24: mol_type = other DNA
gttcagtgtggtggtaatttcatc

SEQ ID NO: 706 - DNA, 21 bp, synthetic construct
  misc_feature 1..21: note = Description of sequence: Sequence Name: 71282-18
  source 1..21: mol_type = other DNA
atctattacagtgggagcacc

SEQ ID NO: 707 - DNA, 24 bp, synthetic construct
  misc_feature 1..24: note = Description of sequence: Sequence Name: 71282-19
  source 1..24: mol_type = other DNA
ataaagcaagatagaagtgagaag

SEQ ID NO: 708 - DNA, 21 bp, synthetic construct
  misc_feature 1..21: note = Description of sequence: Sequence Name: 71282-20
  source 1..21: mol_type = other DNA
atttattggaatgatgatgag

SEQ ID NO: 709 - DNA, 60 bp, synthetic construct
  misc_feature 1..60: note = Description of sequence: Sequence Name: 71281-1
  source 1..60: mol_type = other DNA
gcgaaaaccatcccctattatgatgatttgactggtagaacgtacgactggttcgacccc

SEQ ID NO: 710 - DNA, 45 bp, synthetic construct
  misc_feature 1..45: note = Description of sequence: Sequence Name: 71281-2
  source 1..45: mol_type = other DNA
gcgagaggaatgatgggggtcactggagccgactactttggcttc

SEQ ID NO: 711 - DNA, 36 bp, synthetic construct
  misc_feature 1..36: note = Description of sequence: Sequence Name: 71281-3
  source 1..36: mol_type = other DNA
gtgagttgttctagcagcagctgggaatttgactac

SEQ ID NO: 712 - DNA, 72 bp, synthetic construct
  misc_feature 1..72: note = Description of sequence: Sequence Name: 71281-4
  source 1..72: mol_type = other DNA
gtgaaaactaccggcgcttggggggacgtctttgactatgattcggggacttatctataccactttgactac

SEQ ID NO: 713 - DNA, 54 bp, synthetic construct
  misc_feature 1..54: note = Description of sequence: Sequence Name: 71281-5
  source 1..54: mol_type = other DNA
gcgaacctgataagtttggtggacgatttttggagtgattattatgacgactac

SEQ ID NO: 714 - DNA, 42 bp, synthetic construct
  misc_feature 1..42: note = Description of sequence: Sequence Name: 71281-6
  source 1..42: mol_type = other DNA
gcgagaagtcctggtactgcctggggtggctacatggacgtc

SEQ ID NO: 715 - DNA, 36 bp, synthetic construct
  misc_feature 1..36: note = Description of sequence: Sequence Name: 71281-7
  source 1..36: mol_type = other DNA
gcgaggcaaaagcagcagtatttctactttgactac

SEQ ID NO: 716 - DNA, 48 bp, synthetic construct
  misc_feature 1..48: note = Description of sequence: Sequence Name: 71281-8
  source 1..48: mol_type = other DNA
gcgcgactgaaagttgggccagcgcctggtactcgggtttttgactac

SEQ ID NO: 717 - DNA, 42 bp, synthetic construct
  misc_feature 1..42: note = Description of sequence: Sequence Name: 71281-9
  source 1..42: mol_type = other DNA
gcgacaccctcatcagggcgtacgggggagggtatggacgtc

SEQ ID NO: 718 - DNA, 30 bp, synthetic construct
  misc_feature 1..30: note = Description of sequence: Sequence Name: 71281-10
  source 1..30: mol_type = other DNA
gcgagacacggtgactacgcctttgactcc

SEQ ID NO: 719 - DNA, 39 bp, synthetic construct
  misc_feature 1..39: note = Description of sequence: Sequence Name: 71281-11
  source 1..39: mol_type = other DNA
gcgcggggacaaccgtatagcatctcgccttttgagtcc

SEQ ID NO: 720 - DNA, 60 bp, synthetic construct
  misc_feature 1..60: note = Description of sequence: Sequence Name: 71281-12
  source 1..60: mol_type = other DNA
gcgagacacgattcggcagccctcgccggggactggagcagcggctggccctttgactac

SEQ ID NO: 721 - DNA, 57 bp, synthetic construct
  misc_feature 1..57: note = Description of sequence: Sequence Name: 71281-13
  source 1..57: mol_type = other DNA
gcgagagatcccagaatcgtggtcatggtagctgctaatcgacgaagaattgactac

SEQ ID NO: 722 - DNA, 54 bp, synthetic construct
  misc_feature 1..54: note = Description of sequence: Sequence Name: 71281-14
  source 1..54: mol_type = other DNA
gcgagagataccgttcccaattgtggtactaagtgctatcttacctttgactac

SEQ ID NO: 723 - DNA, 57 bp, synthetic construct
  misc_feature 1..57: note = Description of sequence: Sequence Name: 71281-15
  source 1..57: mol_type = other DNA
gcctcacatctcagtggttcggggacttatcacccaccccagtacggtttggacgtc

SEQ ID NO: 724 - DNA, 33 bp, synthetic construct
  misc_feature 1..33: note = Description of sequence: Sequence Name: 71281-16
  source 1..33: mol_type = other DNA
actagaatccagaggacggaaggctttgactac

SEQ ID NO: 725 - DNA, 54 bp, synthetic construct
  misc_feature 1..54: note = Description of sequence: Sequence Name: 71281-17
  source 1..54: mol_type = other DNA
gcaagagatggtcttatctctgtttcggggagttattatggtctgccgggcgtc

SEQ ID NO: 726 - DNA, 21 bp, synthetic construct
  misc_feature 1..21: note = Description of sequence: Sequence Name: 71281-18
  source 1..21: mol_type = other DNA
gcgagaagagacgggtcgcac

SEQ ID NO: 727 - DNA, 69 bp, synthetic construct
  misc_feature 1..69: note = Description of sequence: Sequence Name: 71281-19
  source 1..69: mol_type = other DNA
gcgagagattgggacggggatgatagtagtgtttattatagggtctacaactactacggtatggacgtc

SEQ ID NO: 728 - DNA, 45 bp, synthetic construct
  misc_feature 1..45: note = Description of sequence: Sequence Name: 71281-20
  source 1..45: mol_type = other DNA
gcaagacagtttcttcgcggagtggtgattaactggttcggcccc

SEQ ID NO: 729 - DNA, 51 bp, synthetic construct
  misc_feature 1..51: note = Description of sequence: Sequence Name: 71281-21
  source 1..51: mol_type = other DNA
gcgagacagaggaaggcagctcgtcctatctactactactacatggacgtc

SEQ ID NO: 730 - DNA, 48 bp, synthetic construct
  misc_feature 1..48: note = Description of sequence: Sequence Name: 71281-22
  source 1..48: mol_type = other DNA
gcgagagccctcggtgacctgccttactactactacggtctggacgtc

SEQ ID NO: 731 - DNA, 45 bp, synthetic construct
  misc_feature 1..45: note = Description of sequence: Sequence Name: 71281-23
  source 1..45: mol_type = other DNA
gcgagagatcattccggcccaggcaacagctggtcctttgactac

SEQ ID NO: 732 - DNA, 36 bp, synthetic construct
  misc_feature 1..36: note = Description of sequence: Sequence Name: 71281-24
  source 1..36: mol_type = other DNA
gcgagacatggggcgaaccccactgcttttgatatc

SEQ ID NO: 733 - DNA, 54 bp, synthetic construct
  misc_feature 1..54: note = Description of sequence: Sequence Name: 71281-25
  source 1..54: mol_type = other DNA
gcgaggactcgggatattgtattactgccaactgttgtggcgggcgactcggac

SEQ ID NO: 734 - DNA, 42 bp, synthetic construct
  misc_feature 1..42: note = Description of sequence: Sequence Name: 71281-26
  source 1..42: mol_type = other DNA
gtgtctcccggtgacaacgttcctgactggtatttcgatctc

SEQ ID NO: 735 - DNA, 54 bp, synthetic construct
  misc_feature 1..54: note = Description of sequence: Sequence Name: 71281-27
  source 1..54: mol_type = other DNA
gcgagacgtggtctccttctgctggcagtggctggtagcggggcttttggtatc

SEQ ID NO: 736 - DNA, 63 bp, synthetic construct
  misc_feature 1..63: note = Description of sequence: Sequence Name: 71281-28
  source 1..63: mol_type = other DNA
gcgagagatgcgaaacgatttttggagtggtccgaaatctacttatactggtacatggacgtc

SEQ ID NO: 737 - DNA, 51 bp, synthetic construct
  misc_feature 1..51: note = Description of sequence: Sequence Name: 71281-29
  source 1..51: mol_type = other DNA
gcgaaagactacggtgactacgacttgggctactactacgctatggacgtc

SEQ ID NO: 738 - DNA, 42 bp, synthetic construct
  misc_feature 1..42: note = Description of sequence: Sequence Name: 71281-30
  source 1..42: mol_type = other DNA
gtgagaggccttggagtgggagctactggtcaccctcgctat

SEQ ID NO: 739 - DNA, 63 bp, synthetic construct
  misc_feature 1..63: note = Description of sequence: Sequence Name: 71281-31
  source 1..63: mol_type = other DNA
gcgaaagacccgacagcccgacttgggtattgtagaggtggtagctgctacttggccgactac

SEQ ID NO: 740 - DNA, 33 bp, synthetic construct
  misc_feature 1..33: note = Description of sequence: Sequence Name: 71281-32
  source 1..33: mol_type = other DNA
gtacaccatacaataactatgatagtaggctac

SEQ ID NO: 741 - DNA, 33 bp, synthetic construct
  misc_feature 1..33: note = Description of sequence: Sequence Name: 71281-33
  source 1..33: mol_type = other DNA
gcgagaggtttcggtgaccactactttaactcc

SEQ ID NO: 742 - DNA, 45 bp, synthetic construct
  misc_feature 1..45: note = Description of sequence: Sequence Name: 71281-34
  source 1..45: mol_type = other DNA
gcgagagattactatgccaggagctgggacggctactttgaccac

SEQ ID NO: 743 - DNA, 33 bp, synthetic construct
  misc_feature 1..33: note = Description of sequence: Sequence Name: 71281-35
  source 1..33: mol_type = other DNA
gcgagagagaccccaggctacggtgacgaagcc

SEQ ID NO: 744 - DNA, 48 bp, synthetic construct
  misc_feature 1..48: note = Description of sequence: Sequence Name: 71281-36
  source 1..48: mol_type = other DNA
gcggcgccaaattgtactggtggttcctgctttgatggttttaatctc

SEQ ID NO: 745 - DNA, 39 bp, synthetic construct
  misc_feature 1..39: note = Description of sequence: Sequence Name: 71281-37
  source 1..39: mol_type = other DNA
gcgagaggcccttattgtcgtggtgctggctgccgtccc

SEQ ID NO: 746 - DNA, 75 bp, synthetic construct
  misc_feature 1..75: note = Description of sequence: Sequence Name: 71281-38
  source 1..75: mol_type = other DNA
gcgagcgtcccacacccacattgtagtagtaccagctgctatgccggcgactactactacttcggtgtggacgtc

SEQ ID NO: 747 - DNA, 33 bp, synthetic construct
  misc_feature 1..33: note = Description of sequence: Sequence Name: 71281-39
  source 1..33: mol_type = other DNA
gcgagagatactaccccctacggtatggacgtc

SEQ ID NO: 748 - DNA, 51 bp, synthetic construct
  misc_feature 1..51: note = Description of sequence: Sequence Name: 71282-1
  source 1..51: mol_type = other DNA
gcgaaatattactatgatattagtgcttattacatccccaactttgactac

SEQ ID NO: 749 - DNA, 51 bp, synthetic construct
  misc_feature 1..51: note = Description of sequence: Sequence Name: 71282-2
  source 1..51: mol_type = other DNA
gcgaagcatcttaagccttgtagtgacagctgctatgccacccttgactac

SEQ ID NO: 750 - DNA, 42 bp, synthetic construct
  misc_feature 1..42: note = Description of sequence: Sequence Name: 71282-3
  source 1..42: mol_type = other DNA
gctagacattcacgcagtagaggtggctacacttacgactat

SEQ ID NO: 751 - DNA, 45 bp, synthetic construct
  misc_feature 1..45: note = Description of sequence: Sequence Name: 71282-4
  source 1..45: mol_type = other DNA
gcgaatgactataccagcagtggctggtacactccccttgactac

SEQ ID NO: 752 - DNA, 48 bp, synthetic construct
  misc_feature 1..48: note = Description of sequence: Sequence Name: 71282-5
  source 1..48: mol_type = other DNA
gcgaaagatctggaggactacggtgacttcgcggcatgttttgactcc

SEQ ID NO: 753 - DNA, 57 bp, synthetic construct
  misc_feature 1..57: note = Description of sequence: Sequence Name: 71282-6
  source 1..57: mol_type = other DNA
gcgagagatggggattattatgatagtagtggtcactctcgagaagcttttgatatc

SEQ ID NO: 754 - DNA, 42 bp, synthetic construct
  misc_feature 1..42: note = Description of sequence: Sequence Name: 71282-7
  source 1..42: mol_type = other DNA
gcgagagcgggcggggggacctactacagttggttcgacccc

SEQ ID NO: 755 - DNA, 54 bp, synthetic construct
  misc_feature 1..54: note = Description of sequence: Sequence Name: 71282-8
  source 1..54: mol_type = other DNA
gcgcgagaccctaccagccactggttggtcggggagcccccctactttgactac

SEQ ID NO: 756 - DNA, 39 bp, synthetic construct
  misc_feature 1..39: note = Description of sequence: Sequence Name: 71282-9
  source 1..39: mol_type = other DNA
gcgagagatgtgataggggagtgggagccacatgcctac

SEQ ID NO: 757 - DNA, 42 bp, synthetic construct
  misc_feature 1..42: note = Description of sequence: Sequence Name: 71282-10
  source 1..42: mol_type = other DNA
gcgagagcgtatggtgggagctacagcggggcttttgatatc

SEQ ID NO: 758 - DNA, 45 bp, synthetic construct
  misc_feature 1..45: note = Description of sequence: Sequence Name: 71282-11
  source 1..45: mol_type = other DNA
gcgagagatagggggggccggtcgtttttagacggtatggacgtc

SEQ ID NO: 759 - DNA, 63 bp, synthetic construct
  misc_feature 1..63: note = Description of sequence: Sequence Name: 71282-12
  source 1..63: mol_type = other DNA
gcgagaacggtgactcccatccgatattgtactagtaccagctgctttacgcgccttcactac

SEQ ID NO: 760 - DNA, 48 bp, synthetic construct
  misc_feature 1..48: note = Description of sequence: Sequence Name: 71282-13
  source 1..48: mol_type = other DNA
gcgagagatccgttagtgggaactactcgacttcatgcttttgatatc

SEQ ID NO: 761 - DNA, 57 bp, synthetic construct
  misc_feature 1..57: note = Description of sequence: Sequence Name: 71282-14
  source 1..57: mol_type = other DNA
gcggcagtcgtggatattgtagtagtacccagtattatattgctgccgcctgactac

SEQ ID NO: 762 - DNA, 57 bp, synthetic construct
  misc_feature 1..57: note = Description of sequence: Sequence Name: 71282-15
  source 1..57: mol_type = other DNA
gcgaaagatgcgggagggaggttcggggagctgttaagggatcactactttgactcc

SEQ ID NO: 763 - DNA, 39 bp, synthetic construct
  misc_feature 1..39: note = Description of sequence: Sequence Name: 71282-16
  source 1..39: mol_type = other DNA
gccagagattcgtggaagccgcaagggggcattgacttc

SEQ ID NO: 764 - DNA, 39 bp, synthetic construct
  misc_feature 1..39: note = Description of sequence: Sequence Name: 71282-17
  source 1..39: mol_type = other DNA
gcgagagaagtagtgactggagtgggcgctaaggcctac

SEQ ID NO: 765 - DNA, 51 bp, synthetic construct
  misc_feature 1..51: note = Description of sequence: Sequence Name: 71282-18
  source 1..51: mol_type = other DNA
gcgaggacgtattactatgataggagtggtccgactcatgcttttgatatc

SEQ ID NO: 766 - DNA, 72 bp, synthetic construct
  misc_feature 1..72: note = Description of sequence: Sequence Name: 71282-19
  source 1..72: mol_type = other DNA
gcgcgaggggtcgcaatggtggatactgttctcacgattactccagcgcggggaaactggcacttcgatctc

SEQ ID NO: 767 - DNA, 66 bp, synthetic construct
  misc_feature 1..66: note = Description of sequence: Sequence Name: 71282-20
  source 1..66: mol_type = other DNA
ggacacagacggcaatttcactataatagcattggttcttactacgaagaatactactttgactac

SEQ ID NO: 768 - protein, 22 aa, synthetic construct
  REGION 1..22: note = Description of sequence: Sequence Name: 71281-1
CAKTIPYYDDLTGRTYDWFDPW

SEQ ID NO: 769 - protein, 17 aa, synthetic construct
  REGION 1..17: note = Description of sequence: Sequence Name: 71281-2
CARGMMGVTGADYFGFW

SEQ ID NO: 770 - protein, 14 aa, synthetic construct
  REGION 1..14: note = Description of sequence: Sequence Name: 71281-3
CVSCSSSSWEFDYW

SEQ ID NO: 771 - protein, 26 aa, synthetic construct
  REGION 1..26: note = Description of sequence: Sequence Name: 71281-4
CVKTTGAWGDVFDYDSGTYLYHFDYW

SEQ ID NO: 772 - protein, 20 aa, synthetic construct
  REGION 1..20: note = Description of sequence: Sequence Name: 71281-5
CANLISLVDDFWSDYYDDYW

SEQ ID NO: 773 - protein, 16 aa, synthetic construct
  REGION 1..16: note = Description of sequence: Sequence Name: 71281-6
CARSPGTAWGGYMDVW

SEQ ID NO: 774 - protein, 14 aa, synthetic construct
  REGION 1..14: note = Description of sequence: Sequence Name: 71281-7
CARQKQQYFYFDYW

SEQ ID NO: 775 - protein, 18 aa, synthetic construct
  REGION 1..18: note = Description of sequence: Sequence Name: 71281-8
CARLKVGPAPGTRVFDYW

SEQ ID NO: 776 - protein, 16 aa, synthetic construct
  REGION 1..16: note = Description of sequence: Sequence Name: 71281-9
CATPSSGRTGEGMDVW

SEQ ID NO: 777 - protein, 12 aa, synthetic construct
  REGION 1..12: note = Description of sequence: Sequence Name: 71281-10
CARHGDYAFDSW

SEQ ID NO: 778 - protein, 15 aa, synthetic construct
  REGION 1..15: note = Description of sequence: Sequence Name: 71281-11
CARGQPYSISPFESW

SEQ ID NO: 779 - protein, 22 aa, synthetic construct
  REGION 1..22: note = Description of sequence: Sequence Name: 71281-12
CARHDSAALAGDWSSGWPFDYW

SEQ ID NO: 780 - protein, 21 aa, synthetic construct
  REGION 1..21: note = Description of sequence: Sequence Name: 71281-13
CARDPRIVVMVAANRRRIDYW

SEQ ID NO: 781 - protein, 20 aa, synthetic construct
  REGION 1..20: note = Description of sequence: Sequence Name: 71281-14
CARDTVPNCGTKCYLTFDYW

SEQ ID NO: 782 - protein, 21 aa, synthetic construct
  REGION 1..21: note = Description of sequence: Sequence Name: 71281-15
CASHLSGSGTYHPPQYGLDVW

SEQ ID NO: 783 - protein, 13 aa, synthetic construct
  REGION 1..13: note = Description of sequence: Sequence Name: 71281-16
CTRIQRTEGFDYW

SEQ ID NO: 784 - protein, 20 aa, synthetic construct
  REGION 1..20: note = Description of sequence: Sequence Name: 71281-17
CARDGLISVSGSYYGLPGVW

SEQ ID NO: 785 - protein, 9 aa, synthetic construct
  REGION 1..9: note = Description of sequence: Sequence Name: 71281-18
CARRDGSHW

SEQ ID NO: 786 - protein, 25 aa, synthetic construct
  REGION 1..25: note = Description of sequence: Sequence Name: 71281-19
CARDWDGDDSSVYYRVYNYYGMDVW

SEQ ID NO: 787 - protein, 17 aa, synthetic construct
  REGION 1..17: note = Description of sequence: Sequence Name: 71281-20
CARQFLRGVVINWFGPW

SEQ ID NO: 788 - protein, 19 aa, synthetic construct
  REGION 1..19: note = Description of sequence: Sequence Name: 71281-21
CARQRKAARPIYYYYMDVW

SEQ ID NO: 789 - protein, 18 aa, synthetic construct
  REGION 1..18: note = Description of sequence: Sequence Name: 71281-22
CARALGDLPYYYYGLDVW

SEQ ID NO: 790 - protein, 17 aa, synthetic construct
  REGION 1..17: note = Description of sequence: Sequence Name: 71281-23
CARDHSGPGNSWSFDYW

SEQ ID NO: 791 - protein, 14 aa, synthetic construct
  REGION 1..14: note = Description of sequence: Sequence Name: 71281-24
CARHGANPTAFDIW

SEQ ID NO: 792 - protein, 20 aa, synthetic construct
  REGION 1..20: note = Description of sequence: Sequence Name: 71281-25
CARTRDIVLLPTVVAGDSDW

SEQ ID NO: 793 - protein, 16 aa, synthetic construct
  REGION 1..16: note = Description of sequence: Sequence Name: 71281-26
CVSPGDNVPDWYFDLW

SEQ ID NO: 794 - protein, 20 aa, synthetic construct
  REGION 1..20: note = Description of sequence: Sequence Name: 71281-27
CARRGLLLLAVAGSGAFGIW

SEQ ID NO: 795 - protein, 23 aa, synthetic construct
  REGION 1..23: note = Description of sequence: Sequence Name: 71281-28
CARDAKRFLEWSEIYLYWYMDVW

SEQ ID NO: 796 - protein, 19 aa, synthetic construct
  REGION 1..19: note = Description of sequence: Sequence Name: 71281-29
CAKDYGDYDLGYYYAMDVW

SEQ ID NO: 797 - protein, 16 aa, synthetic construct
  REGION 1..16: note = Description of sequence: Sequence Name: 71281-30
CVRGLGVGATGHPRYW

SEQ ID NO: 798 - protein, 23 aa, synthetic construct
  REGION 1..23: note = Description of sequence: Sequence Name: 71281-31
CAKDPTARLGYCRGGSCYLADYW

SEQ ID NO: 799 - protein, 13 aa, synthetic construct
  REGION 1..13: note = Description of sequence: Sequence Name: 71281-32
CVHHTITMIVGYW

SEQ ID NO: 800 - protein, 13 aa, synthetic construct
  REGION 1..13: note = Description of sequence: Sequence Name: 71281-33
CARGFGDHYFNSW

SEQ ID NO: 801 - protein, 17 aa, synthetic construct
  REGION 1..17: note = Description of sequence: Sequence Name: 71281-34
CARDYYARSWDGYFDHW

SEQ ID NO: 802 - protein, 13 aa, synthetic construct
  REGION 1..13: note = Description of sequence: Sequence Name: 71281-35
CARETPGYGDEAW

SEQ ID NO: 803 - protein, 18 aa, synthetic construct
  REGION 1..18: note = Description of sequence: Sequence Name: 71281-36
CAAPNCTGGSCFDGFNLW

SEQ ID NO: 804 - protein, 15 aa, synthetic construct
  REGION 1..15: note = Description of sequence: Sequence Name: 71281-37
CARGPYCRGAGCRPW

SEQ ID NO: 805 - protein, 27 aa, synthetic construct
  REGION 1..27: note = Description of sequence: Sequence Name: 71281-38
CASVPHPHCSSTSCYAGDYYYFGVDVW

SEQ ID NO: 806 - protein, 13 aa, synthetic construct
  REGION 1..13: note = Description of sequence: Sequence Name: 71281-39
CARDTTPYGMDVW

SEQ ID NO: 807 - protein, 19 aa, synthetic construct
  REGION 1..19: note = Description of sequence: Sequence Name: 71282-1
CAKYYYDISAYYIPNFDYW

SEQ ID NO: 808 - protein, 19 aa, synthetic construct
  REGION 1..19: note = Description of sequence: Sequence Name: 71282-2
CAKHLKPCSDSCYATLDYW

SEQ ID NO: 809 - protein, 16 aa, synthetic construct
  REGION 1..16: note = Description of sequence: Sequence Name: 71282-3
CARHSRSRGGYTYDYW

SEQ ID NO: 810 - protein, 17 aa, synthetic construct
  REGION 1..17: note = Description of sequence: Sequence Name: 71282-4
CANDYTSSGWYTPLDYW

SEQ ID NO: 811 - protein, 18 aa, synthetic construct
  REGION 1..18: note = Description of sequence: Sequence Name: 71282-5
CAKDLEDYGDFAACFDSW

SEQ ID NO: 812 - protein, 21 aa, synthetic construct
  REGION 1..21: note = Description of sequence: Sequence Name: 71282-6
CARDGDYYDSSGHSREAFDIW

SEQ ID NO: 813 - protein, 16 aa, synthetic construct
  REGION 1..16: note = Description of sequence: Sequence Name: 71282-7
CARAGGGTYYSWFDPW

SEQ ID NO: 814 - protein, 20 aa, synthetic construct
  REGION 1..20: note = Description of sequence: Sequence Name: 71282-8
CARDPTSHWLVGEPPYFDYW

SEQ ID NO: 815 - protein, 15 aa, synthetic construct
  REGION 1..15: note = Description of sequence: Sequence Name: 71282-9
CARDVIGEWEPHAYW

SEQ ID NO: 816 - protein, 16 aa, synthetic construct
  REGION 1..16: note = Description of sequence: Sequence Name: 71282-10
CARAYGGSYSGAFDIW

SEQ ID NO: 817 - protein, 17 aa, synthetic construct
  REGION 1..17: note = Description of sequence: Sequence Name: 71282-11
CARDRGGRSFLDGMDVW

SEQ ID NO: 818 - protein, 23 aa, synthetic construct
  REGION 1..23: note = Description of sequence: Sequence Name: 71282-12
CARTVTPIRYCTSTSCFTRLHYW

SEQ ID NO: 819 - protein, 18 aa, synthetic construct
  REGION 1..18: note = Description of sequence: Sequence Name: 71282-13
CARDPLVGTTRLHAFDIW

SEQ ID NO: 820 - protein, 21 aa, synthetic construct
  REGION 1..21: note = Description of sequence: Sequence Name: 71282-14
CAAVVDIVVVPSIILLPPDYW

SEQ ID NO: 821 - protein, 21 aa, synthetic construct
  REGION 1..21: note = Description of sequence: Sequence Name: 71282-15
CAKDAGGRFGELLRDHYFDSW

SEQ ID NO: 822 - protein, 15 aa, synthetic construct
  REGION 1..15: note = Description of sequence: Sequence Name: 71282-16
CARDSWKPQGGIDFW

SEQ ID NO: 823 - protein, 15 aa, synthetic construct
  REGION 1..15: note = Description of sequence: Sequence Name: 71282-17
CAREVVTGVGAKAYW

SEQ ID NO: 824 - protein, 19 aa, synthetic construct
  REGION 1..19: note = Description of sequence: Sequence Name: 71282-18
CARTYYYDRSGPTHAFDIW

SEQ ID NO: 825 - protein, 26 aa, synthetic construct
  REGION 1..26: note = Description of sequence: Sequence Name: 71282-19
CARGVAMVDTVLTITPARGNWHFDLW

SEQ ID NO: 826 - protein, 24 aa, synthetic construct
  REGION 1..24: note = Description of sequence: Sequence Name: 71282-20
CGHRRQFHYNSIGSYYEEYYFDYW

SEQ ID NO: 827 - protein, 20 aa, synthetic construct
  REGION 1..20: note = Description of sequence: Sequence Name: 71281-1
AKTIPYYDDLTGRTYDWFDP

SEQ ID NO: 828 - protein, 15 aa, synthetic construct
  REGION 1..15: note = Description of sequence: Sequence Name: 71281-2
ARGMMGVTGADYFGF

SEQ ID NO: 829 - protein, 12 aa, synthetic construct
  REGION 1..12: note = Description of sequence: Sequence Name: 71281-3
VSCSSSSWEFDY

SEQ ID NO: 830 - protein, 24 aa, synthetic construct
  REGION 1..24: note = Description of sequence: Sequence Name: 71281-4
VKTTGAWGDVFDYDSGTYLYHFDY

SEQ ID NO: 831 - protein, 18 aa, synthetic construct
  REGION 1..18: note = Description of sequence: Sequence Name: 71281-5
ANLISLVDDFWSDYYDDY

SEQ ID NO: 832 - protein, 14 aa, synthetic construct
  REGION 1..14: note = Description of sequence: Sequence Name: 71281-6
ARSPGTAWGGYMDV

SEQ ID NO: 833 - protein, 12 aa, synthetic construct
  REGION 1..12: note = Description of sequence: Sequence Name: 71281-7
ARQKQQYFYFDY

SEQ ID NO: 834 - protein, 16 aa, synthetic construct
  REGION 1..16: note = Description of sequence: Sequence Name: 71281-8
ARLKVGPAPGTRVFDY

SEQ ID NO: 835 - protein, 14 aa, synthetic construct
  REGION 1..14: note = Description of sequence: Sequence Name: 71281-9
ATPSSGRTGEGMDV

SEQ ID NO: 836 - protein, 10 aa, synthetic construct
  REGION 1..10: note = Description of sequence: Sequence Name: 71281-10
ARHGDYAFDS

SEQ ID NO: 837 - protein, 13 aa, synthetic construct
  REGION 1..13: note = Description of sequence: Sequence Name: 71281-11
ARGQPYSISPFES

SEQ ID NO: 838 - protein, 20 aa, synthetic construct
  REGION 1..20: note = Description of sequence: Sequence Name: 71281-12
ARHDSAALAGDWSSGWPFDY

SEQ ID NO: 839 - protein, 19 aa, synthetic construct
  REGION 1..19: note = Description of sequence: Sequence Name: 71281-13
ARDPRIVVMVAANRRRIDY

SEQ ID NO: 840 - protein, 18 aa, synthetic construct
  REGION 1..18: note = Description of sequence: Sequence Name: 71281-14
ARDTVPNCGTKCYLTFDY

SEQ ID NO: 841 - protein, 19 aa, synthetic construct
  REGION 1..19: note = Description of sequence: Sequence Name: 71281-15
ASHLSGSGTYHPPQYGLDV

SEQ ID NO: 842 - protein, 11 aa, synthetic construct
  REGION 1..11: note = Description of sequence: Sequence Name: 71281-16
TRIQRTEGFDY

SEQ ID NO: 843 - protein, 18 aa, synthetic construct
  REGION 1..18: note = Description of sequence: Sequence Name: 71281-17
ARDGLISVSGSYYGLPGV

SEQ ID NO: 844 - protein, 7 aa, synthetic construct
  REGION 1..7: note = Description of sequence: Sequence Name: 71281-18
ARRDGSH

SEQ ID NO: 845 - protein, 23 aa, synthetic construct
  REGION 1..23: note = Description of sequence: Sequence Name: 71281-19
ARDWDGDDSSVYYRVYNYYGMDV

SEQ ID NO: 846 - protein, 15 aa, synthetic construct
  REGION 1..15: note = Description of sequence: Sequence Name: 71281-20
ARQFLRGVVINWFGP

SEQ ID NO: 847 - protein, 17 aa, synthetic construct
  REGION 1..17: note = Description of sequence: Sequence Name: 71281-21
ARQRKAARPIYYYYMDV

SEQ ID NO: 848 - protein, 16 aa, synthetic construct
  REGION 1..16: note = Description of sequence: Sequence Name: 71281-22
ARALGDLPYYYYGLDV

SEQ ID NO: 849 - protein, 15 aa, synthetic construct
  REGION 1..15: note = Description of sequence: Sequence Name: 71281-23
ARDHSGPGNSWSFDY

SEQ ID NO: 850 - protein, 12 aa, synthetic construct
  REGION 1..12: note = Description of sequence: Sequence Name: 71281-24
ARHGANPTAFDI

SEQ ID NO: 851 - protein, 18 aa, synthetic construct
  REGION 1..18: note = Description of sequence: Sequence Name: 71281-25
ARTRDIVLLPTVVAGDSD

SEQ ID NO: 852 - protein, 14 aa, synthetic construct
  REGION 1..14: note = Description of sequence: Sequence Name: 71281-26
VSPGDNVPDWYFDL

SEQ ID NO: 853 - protein, 18 aa, synthetic construct
  REGION 1..18: note = Description of sequence: Sequence Name: 71281-27
ARRGLLLLAVAGSGAFGI

SEQ ID NO: 854 - protein, 21 aa, synthetic construct
  REGION 1..21: note = Description of sequence: Sequence Name: 71281-28
ARDAKRFLEWSEIYLYWYMDV

SEQ ID NO: 855 - protein, 17 aa, synthetic construct
  REGION 1..17: note = Description of sequence: Sequence Name: 71281-29
AKDYGDYDLGYYYAMDV

SEQ ID NO: 856 - protein, 14 aa, synthetic construct
  REGION 1..14: note = Description of sequence: Sequence Name: 71281-30
VRGLGVGATGHPRY

SEQ ID NO: 857 - protein, 21 aa, synthetic construct
  REGION 1..21: note = Description of sequence: Sequence Name: 71281-31
AKDPTARLGYCRGGSCYLADY

SEQ ID NO: 858 - protein, 11 aa, synthetic construct
  REGION 1..11: note = Description of sequence: Sequence Name: 71281-32
VHHTITMIVGY

SEQ ID NO: 859 - protein, 11 aa, synthetic construct
  REGION 1..11: note = Description of sequence: Sequence Name: 71281-33
ARGFGDHYFNS

SEQ ID NO: 860 - protein, 15 aa, synthetic construct
  REGION 1..15: note = Description of sequence: Sequence Name: 71281-34
ARDYYARSWDGYFDH

SEQ ID NO: 861 - protein, 11 aa, synthetic construct
  REGION 1..11: note = Description of sequence: Sequence Name: 71281-35
ARETPGYGDEA

SEQ ID NO: 862 - protein, 16 aa, synthetic construct
  REGION 1..16: note = Description of sequence: Sequence Name: 71281-36
AAPNCTGGSCFDGFNL

SEQ ID NO: 863 - protein, 13 aa, synthetic construct
  REGION 1..13: note = Description of sequence: Sequence Name: 71281-37
ARGPYCRGAGCRP

SEQ ID NO: 864 - protein, 25 aa, synthetic construct
  REGION 1..25: note = Description of sequence: Sequence Name: 71281-38
ASVPHPHCSSTSCYAGDYYYFGVDV

SEQ ID NO: 865 - protein, 11 aa, synthetic construct
  REGION 1..11: note = Description of sequence: Sequence Name: 71281-39
ARDTTPYGMDV

SEQ ID NO: 866 - protein, 17 aa, synthetic construct
  REGION 1..17: note = Description of sequence: Sequence Name: 71282-1
AKYYYDISAYYIPNFDY

SEQ ID NO: 867 - protein, 17 aa, synthetic construct
  REGION 1..17: note = Description of sequence: Sequence Name: 71282-2
AKHLKPCSDSCYATLDY

SEQ ID NO: 868 - protein, 14 aa, synthetic construct
  REGION 1..14: note = Description of sequence: Sequence Name: 71282-3
ARHSRSRGGYTYDY

SEQ ID NO: 869 - protein, 15 aa, synthetic construct
  REGION 1..15: note = Description of sequence: Sequence Name: 71282-4
ANDYTSSGWYTPLDY

SEQ ID NO: 870 - protein, 16 aa, synthetic construct
  REGION 1..16: note = Description of sequence: Sequence Name: 71282-5
AKDLEDYGDFAACFDS

SEQ ID NO: 871 - protein, 19 aa, synthetic construct
  REGION 1..19: note = Description of sequence: Sequence Name: 71282-6
ARDGDYYDSSGHSREAFDI

SEQ ID NO: 872 - protein, 14 aa, synthetic construct
  REGION 1..14: note = Description of sequence: Sequence Name: 71282-7
ARAGGGTYYSWFDP

SEQ ID NO: 873 - protein, 18 aa, synthetic construct
  REGION 1..18: note = Description of sequence: Sequence Name: 71282-8
ARDPTSHWLVGEPPYFDY

SEQ ID NO: 874 - protein, 13 aa, synthetic construct
  REGION 1..13: note = Description of sequence: Sequence Name: 71282-9
ARDVIGEWEPHAY

SEQ ID NO: 875 - protein, 14 aa, synthetic construct
  REGION 1..14: note = Description of sequence: Sequence Name: 71282-10
ARAYGGSYSGAFDI

SEQ ID NO: 876 - protein, 15 aa, synthetic construct
  REGION 1..15: note = Description of sequence: Sequence Name: 71282-11
ARDRGGRSFLDGMDV

SEQ ID NO: 877 - protein, 21 aa, synthetic construct
  REGION 1..21: note = Description of sequence: Sequence Name: 71282-12
ARTVTPIRYCTSTSCFTRLHY

SEQ ID NO: 878 - protein, 16 aa, synthetic construct
  REGION 1..16: note = Description of sequence: Sequence Name: 71282-13
ARDPLVGTTRLHAFDI

SEQ ID NO: 879 - protein, 19 aa, synthetic construct
  REGION 1..19: note = Description of sequence: Sequence Name: 71282-14
AAVVDIVVVPSIILLPPDY

SEQ ID NO: 880 - protein, 19 aa, synthetic construct
  REGION 1..19: note = Description of sequence: Sequence Name: 71282-15
AKDAGGRFGELLRDHYFDS

SEQ ID NO: 881 - protein, 13 aa, synthetic construct
  REGION 1..13: note = Description of sequence: Sequence Name: 71282-16
ARDSWKPQGGIDF

SEQ ID NO: 882 - protein, 13 aa, synthetic construct
  REGION 1..13: note = Description of sequence: Sequence Name: 71282-17
AREVVTGVGAKAY

SEQ ID NO: 883 - protein, 17 aa, synthetic construct
  REGION 1..17: note = Description of sequence: Sequence Name: 71282-18
ARTYYYDRSGPTHAFDI

SEQ ID NO: 884 - protein, 24 aa, synthetic construct
  REGION 1..24: note = Description of sequence: Sequence Name: 71282-19
ARGVAMVDTVLTITPARGNWHFDL

SEQ ID NO: 885 - protein, 22 aa, synthetic construct
  REGION 1..22: note = Description of sequence: Sequence Name: 71282-20
GHRRQFHYNSIGSYYEEYYFDY

SEQ ID NO: 886 - DNA, 635 bp, synthetic construct
  misc_feature 1..635: note = Description of sequence: Sequence Name: 71281-1
  source 1..635: mol_type = other DNA
tgagcgcagaaggcaggactcgggacaatcttcatcatgacctgctcccctctcctcctcacccttctcattcactgcacagggtcctgggcccagtctgtgttgacgcagccgccctcagtgtctgcggccccaggacagaaggtcaccatctcctgctctggaagcagctccaacattggcaataattatgtatcctggtaccagcagctcccaggaacagcccccaaactcctcatctatgaaaataataagcgaccctcagggattcctgaccgattctctggctccaagtctggcacgtcagccaccctgggcatcaccgggctccagactggggacgaggccgatttttactgcggaacatgggatagcagcctgagtgcttttgtcttcggaactgggaccaaggtcaccgccctaggtcagcccaaggccaaccccactgtcactctgttcccgccctcctctgaggagctccaagccaacaaggccacactagtgtgtctgatcagtgacttctacccgggagctgtgacagtggcctggaaggcagatggcagccccgtcaaggcgggagtggagaccaccaaaccctccaaacagagcaacaacaagtacgcggccagcagcta

SEQ ID NO: 887 - DNA, 566 bp, synthetic construct
  misc_feature 1..566: note = Description of sequence: Sequence Name: 71281-2
  source 1..566: mol_type = other DNA
gagctacaacaggcaggcaggggcagcaagatggtgttgcagacccaggtcttcatttctctgttgctctggatctctggtgcctacggggacatcgtgatgacccagtctccagactccctggctgtgtctctgggcgagggggccaccgtcaactgcaagtccagccagagtgttttctacagctccaccaataacagctacttagcttggtaccagcagaaaccaggacagcctcctaagttactcatttattgggcatctacccgggaatccggggtccctgaccgattcagtggcagcgggtctgggacagatttcactctcaccatcagtagcctccaggctgaagatgtggcagtttattactgtcaacaatattataacactcccctcactttcggcggagggaccagggtggagatcaaacgaactgtggctgcaccatctgtcttcatcttcccgccatctgatgagcagttgaaatctggaactgcctctgttgtgtgcctgctgaataacttctatcccagagaggccaaagtacagtggaaggtggataacgc

SEQ ID NO: 888 - DNA, 624 bp, synthetic construct
  misc_feature 1..624: note = Description of sequence: Sequence Name: 71281-3
  source 1..624: mol_type = other DNA
ctgggcctcaggaagcagcatcggaggtgcctcagccatggcatggatccctctcttcctcggcgtccttgcttactgcacaggatccgtggcctcctatgagctgactcagccaccctcagtgtccgtgtccccaggacagacagccagcatcacctgctctggagataaattgggggataagtttgtttgctggtatcagcagaagccaggcctgtcccctctactggtcatctatcaagataacaagcggccctcagggatccctgagcgattctctggctccaactctgggaacacagccactctgaccatcagcgggacccaggccatggatgaggctgactatttttgtcaggcgtgggctagtagcactgcgatattcggcggagggaccaagctgaccgtcctacgtcagcccaaggctgccccctcggtcactctgttcccgccctcctctgaggagcttcaagccaacaaggccacactggtgtgtctcataagtgacttctacccgggagccgtgacagtggcctggaaggcagatagcagccccgtcaaggcgggagtggagaccaccacaccctccaaacaaagcaacaacaagtacgcggccagcagcta

SEQ ID NO: 889 - DNA, 557 bp, synthetic construct
  misc_feature 1..557: note = Description of sequence: Sequence Name: 71281-4
  source 1..557: mol_type = other DNA
ggggaggaactgctcagttaggacccagacggaaccatggaagccccagcgcagcttctcttcctcctgctactctggctcccagatatcactggagaaatagtgatgacgcagtctccagccaccctgtctgtgtctccaggggaaagagccaccctctcctgcagggccagtcagagtgttagcagcaacttagcctggtaccagcagaaacctggccaggctcccaggctcctcatctatggtgcatcctccagggccactggtatcccagccagattcagtggcagtgggtctgggacagagttcactctcaccatcagcagcctgcagtctgaagattttgcagtttattactgtcagcagtataataactggccttcgtacacttttggccaggggaccaagttggagatcaaacgaactgtggctgcaccatctgtcttcatcttcccgccatctgatgagcagttgaaatctggaactgcctctgttgtgtgcctgctgaataacttctatcccagagaggccaaagtacagtggaaggtggataacgc

SEQ ID NO: 890 - DNA, 635 bp, synthetic construct
  misc_feature 1..635: note = Description of sequence: Sequence Name: 71281-5
  source 1..635: mol_type = other DNA
tgagcgcagaaggcaggactcgggacaatcttcatcatgacctgctcccctctcctcctcacccttctcattcactgcacagggtcctgggcccagtctgtgttgacgcagccgccctcagtgtctgcggccccaggacagaaggtcaccatctcctgctctggaagcagctccaacattgagaagaattatgtatcctggtaccagctcctcccaggaagagcccccaaactcctcatccatcaaaatagtaagcgaccctcagggattcctgaccgattctctggctccaagtctggcacgtcagccaccctgggcatcaccggactccagactggggacgaggccgattattactgcggaacatgggatagcagcctgagagctgtggtattcggcggagggaccaagctgaccgtcctaggtcagcccaaggctgccccctcggtcactctgttcccgccctcctctgaggagcttcaagccaacaaggccacactggtgtgtctcataagtgacttctacccgggagccgtgacagtggcctggaaggcagatagcagccccgtcaaggcgggagtggagaccaccacaccctccaaacaaagcaacaacaagtacgcggccagcagcta

SEQ ID NO: 891 - DNA, 555 bp, synthetic construct
  misc_feature 1..555: note = Description of sequence: Sequence Name: 71281-6
  source 1..555: mol_type = other DNA
gatggggagtcagtcccaaccaggacacagcatggacatgagggtccctgctcagctcctggggctcctgctgctctggctctcaggtgccagatgtgacatccagatgacccagtctccatcctccctgtctgcatctgtaggagacagagtcaccatcacttgccaggcgagtcaggacattaacaattatttaaattggtatcaacagaaaccagggaaagcccctaaactcctgatctacgatgcatccaatttggatacaggggtcccatcaaggttcagcggaagtggatctgggacagattttactttcaccatcagcagcctgcagcctgaagatgttgcaacatattactgtcaacagtatgagaatctgatattcactttcggccctgggaccaaagtggatgtcaaacgaactgtggctgcaccatctgtcttcatcttcccgccatctgatgagcagttgaaatctggaactgcctctgttgtgtgcctgctgaataacttctatcccagagaggccaaagtacagtggaaggtggataacgc

SEQ ID NO: 892 - DNA, 628 bp, synthetic construct
  misc_feature 1..628: note = Description of sequence: Sequence Name: 71281-7
  source 1..628: mol_type = other DNA
gtgggtccaggaggcagaactcggggtgtctcaccatggcctggatcccgctacttctccccctcctcactctctgcacagggtctgaggcctcccatgagctgacacagccaccctcggtgtcagtgtccccaagacagacggccaggatcacctgctctggagataatttgccaaagcagtatacttattggtaccagcagaagccaggccaggcccctctgttggtgatatataaagacagtgagaggccctctgggattcctgagcgattctctggctccagctcagggactacagtcacgttgaccatcagtggagtccaggcagaagacgaggctgactattactgtcagtcagcagacaccggtggaacttttgtggtcttcggcggagggaccaagctgagcgtcctaggtcagcccaaggctgccccctcggtcactctgttcccgccctcctctgaggagcttcaagccaacaaggccacactggtgtgtctcataagtgacttctacccgggagccgtgacagtggcctggaaggcagatagcagccccgtcaaggcgggagtggagaccaccacaccctccaaacaaagcaacaacaagtacgcggccagcagcta

SEQ ID NO: 893 - DNA, 557 bp, synthetic construct
  misc_feature 1..557: note = Description of sequence: Sequence Name: 71281-8
  source 1..557: mol_type = other DNA
tgggggagtcagtctcagtcaggacacagcatggacatgagggtccccgctcagctcctggggctcctgctactctggctccgaggtgccagatgtgacatccagatgacccagtctccatcctccctgtctgcatctgtaggagacagggtcaccatcacttgccgggcaagtcagagcattgccaggtttttaaattggtatcagcagaagccagggaaagcccctaagctcctgatctatgctgcatccagtttgcaaagtggggtcccatcaaggttcagtggcagtggatctgggacagatttcactctcaccatcagcagtctgcaacctgaagattttgcaacttactactgtcaacagagttacagtgtccctccgctcactttcggcggagggacgaaggtggagatcaaaggaactgtggctgcaccatctgtcttcatcttcccgccatctgatgagcagttgaaatctggaactgcctctgttgtgtgcctgctgaataacttctatcccagagaggccaaagtacagtggaaggtggataacgc

SEQ ID NO: 894 - DNA, 628 bp, synthetic construct
  misc_feature 1..628: note = Description of sequence: Sequence Name: 71281-9
  source 1..628: mol_type = other DNA
gtgggctcaggaggcagagctctgggaatctcaccatggcctggacccctctcctgctccccctcctcactttctgcacagtctctgaggcctcctatgagctgacacagccaccctcggtgtcagtgtccccaggacaaacggccaggatcacctgctctggagatgcattgccaaaaaaatatgcttattggtaccagcagaagtcaggccaggcccctgtgctggtcatctatgaggacagcaaacgaccctccgggatccctgagagattctctggctccagctcagggacaatggccaccttgactatcagtggggcccagatggaggatgaagctgactactactgttactcaacagacagcactggtaatcatagggtgttcggcggggggaccaagctgaccgtcctaggtcagcccaaggctgccccctcggtcactctgttcccgccctcctctgaggagcttcaagccaacaaggccacactggtgtgtctcataagtgacttctacccgggagccgtgacagtggcctggaaggcagatagcagccccgtcaaggcgggagtggagaccaccacaccctccaaacaaagcaacaacaagtacgcggccagcagcta

SEQ ID NO: 895 - DNA, 569 bp, synthetic construct
  misc_feature 1..569: note = Description of sequence: Sequence Name: 71281-10
  source 1..569: mol_type = other DNA
ctgggggatcaggactcctcagttcaccttctcacaatgaggctccctgctcagctcctggggctgctaatgctctgggtctctggatgcagtggggatgttgtgatgactcagtctccaccctccctgcccgccacccctggagagccggcctccatctcctgcaggtctagtcagagcctcctgcgtagtaatggaaagaaccatttgaattggtacctgcagaggccagggcagtctccacagctcctgatctacatgggttctattcgggcctccggggtccctgacaggttcagtggcagtggatcaggcacagattttacactgaaaatcagcacagtggaggctgaggatgttggggtttattactgcatgcaagctctacaaattccgtggacgttcggccaagggaccaaggtggaactcaaacgaactgtggctgcaccatctgtcttcatcttcccgccatctgatgagcagttgaaatctggaactgcctctgttgtgtgcctgctgaataacttctatcccagagaggccaaagtacagtggaaggtggataacgc

SEQ ID NO: 896 - DNA, 562 bp, synthetic construct
  misc_feature 1..562: note = Description of sequence: Sequence Name: 71281-11
  source 1..562: mol_type = other DNA
agagctctggagaagagctgctcagttaggacccagagggaaccatggaaaccccagcgcagcttctcttcctcctgctactctggctcccagatgccaccggagaaattgtgttgacgcagtctccaggcaccctctctttgtctccaggggaaagagccaccctctcctgcagggccagtcagagtgttagtagctacttagcctggtatcagcagaaacctggccaggctcccaggctcctcatctatggtgcatccaacagggccactggcatcccagacaggttcagtggtagtggatctgggacagacttcactctcaccatcagcagactggagcctgaggattttgcagtgtattactgtcagcagtgtggtagttcacctcggacgttcggccaagggaccaaggtggaagtcaaacgaactgtggctgcaccatctgtcttcatcttcccgccatctgatgagcagttgaaatctggaactgcctctgttgtgtgcctgctgaataacttctatcccagagaggccaaagtacagtggaaggtggataacgc

SEQ ID NO: 897 - DNA, 633 bp, synthetic construct
  misc_feature 1..633: note = Description of sequence: Sequence Name: 71281-12
  source 1..633: mol_type = other DNA
agctgtgggctcagaagcagagttctggggtgtctccaccatggcctggacccctctctggctcactctcctcactctttgcataggttctgtggtttcttctgagttgactcaggaccctgctgtgtctgtggccttgggacagacagtcaggatcacatgccaaggagacagcctcagatattattatgcaagctggtaccagcagaagccaggacaggcccctgtacttgtcatctttggtaaaaacaaccggccctcagggatcccagaacgagtctctggctccagctcaggaaacacagcttccttgaccatcactggggctcaggcggaagatgaggctgactattactgtaattcccgggacagcagtggtaaccattgggtgttcggcggagggaccaagttgaccgtcctaggtcagcccaaggctgccccctcggtcactctgttcccaccctcctctgaggagcttcaagccaacaaggccacactggtgtgtctcataagtgacttctacccgggagccgtgacagtggcctggaaggcagatagcagccccgtcaaggcgggagtggagaccaccacaccctccaaacaaagcaacaacaagtacgcggccagcagcta

SEQ ID NO: 898 - DNA, 553 bp, synthetic construct
  misc_feature 1..553: note = Description of sequence: Sequence Name: 71281-13
  source 1..553: mol_type = other DNA
ggagtcagtcccaaccaggacacagcatggacatgagggtccctgctcagctcctggggctcctgctgctctggctctcaggtgccagatgtgacatccagatgacccagtctccatcctccctgtctgcatctgtgggagacagagtcaccatcacttgccaggcgagtcaggacatcaactactatttgaattggtatcaacaccggccagggaaagcccctcagctcctgatctacgatgcttccaaattggaaacaggggtcccatcaaggttcagtggaagtgcatctgggacagatttcactctcaccatcagcggcctgcagcctgaagatattgcaacatattactgtcaacagtatgataattcccctcggatcaccttcggccaagggacacgactggagattaagcgaactgtggctgcaccatctgtcttcatcttcccgccatctgatgagcagttgaaatctggaactgcctctgttgtgtgcctgctgaataacttctatcccagagaggccaaagtacagtggaaggtggataacgc

SEQ ID NO: 899 - DNA, 565 bp, synthetic construct
  misc_feature 1..565: note = Description of sequence: Sequence Name: 71281-14
  source 1..565: mol_type = other DNA
gggagagccctggggaggaactgctcagttaggacccagagggaaccatggaagccccagctcagcttctcttcctcctgctactctggctcccagataccaccggagaaattgtgttgacacagtctccagccaccctgtctttgtctccaggggaaagagccaccctctcctgcagggccactcagagtgttaggacccacttagcctggtaccaacagaaacctggccaggctcccaggctcctcatctatgatacatccaacagggccactggcatcccagccaggttcagtggcagtgggtctgggacagacttcactctcaccatcagcagcctagagcctgaagattttgcagtttattactgtcagcagcgtaacaagtggcccatcaccttcggccaagggacacgactggagattaaacgaactgtggctgcaccatctgtcttcatcttcccgccatctgatgagcagttgaaatctggaactgcctctgttgtgtgcctgctgaataacttctatcccagagaggccaaagtacagtggaaggtggataacgc

SEQ ID NO: 900 - DNA, 553 bp, synthetic construct
  misc_feature 1..553: note = Description of sequence: Sequence Name: 71281-15
  source 1..553: mol_type = other DNA
ggagtcagtcccagtcaggacacagcatggacatgagggtccccgctcagctcctggggctcctgctgctctggctcccaggtgccagatgtgacatccagttgacccagtctccatccttcctgtctgcatctgtgggagacagtatcagcatcacttgccgggccagtcaggccatcagcacttatttagcctggtatcaacaaaaaccagggaaagccccgaagctcctgatctatggtgcatccactttgcaaagtggggtcccaccaaggttcagcggcagtggatctgggacagatttcactctcacaatcagcagcctgcagcctgaagattttgcaacttattactgtcagcaacttgatcgttaccctccgttcaccttcggccaagggacacgactggagattaaacgaactgtggctgcaccatctgtcttcatcttcccgccatctgatgagcagttgaaatctggaactgcctctgttgtgtgcctgctgaataacttctatcccagagaggccaaagtacagtggaaggtggataacgc

SEQ ID NO: 901 - DNA, 557 bp, synthetic construct
  misc_feature 1..557: note = Description of sequence: Sequence Name: 71281-16
  source 1..557: mol_type = other DNA
gaagagctgctcagttaggacccagagggaaccatggaaaccccagcgcagcttctcttcctcctgctactctggctcccagataccaccggagaaattgtgttgacgcagtctccaggcaccctgtctttgtctccaggggaaagagccaccctctcctgcagggccagtcagagtgttagcagcagctacttagcctggtaccagcagaaacctggccaggctcccaggctcctcatctatggtgcatccaccagggccactggcatcccagacaggttcagtggcagtgggtctgggacagacttcactctcaccatcagcagactggagcctgaagattttgccgtgtattactgtcagcactatggtagctcacctccgaggacgttcggccaagggaccaaggtggaaatcaaacgaactgtggctgcaccatctgtcttcatcttcccgccatctgatgagcagttgaaatctggaactgcctctgttgtgtgcctgctgaataacttctatcccagagaggccaaagtacagtggaaggtggataacgc

SEQ ID NO: 902 - DNA, 565 bp, synthetic construct
  misc_feature 1..565: note = Description of sequence: Sequence Name: 71281-17
  source 1..565: mol_type = other DNA
gggagagccctggggaggaactgctcagttaggacccagagggaaccatggaagccccagctcagcttctcttcctcctgctactctggctcccagataccaccgcagaaattgtgttgacacagtctccagccaccctgtctttgtctccaggggaaagagccaccctctcctgcagggccagtcagagtgttagcagctacttagcctggttccaacagaaacctggccaggctcccaggctcctcatctatgatgcatccaacagggccactggcatcccagccaggttcagtggcagtgggtctgggacaggcttcactctcaccatcaacggcctagagcctgacgattttgcagtttattactgtcagcagcgtcggagctggccgtacacttttggccaggggaccaagctggagatcaaacgaactgtggctgcaccatctgtcttcatcttcccgccatctgatgagcagttgaaatctggaactgcctctgttgtgtgcctgctgaataacttctatcccagagaggccaaagtacagtggaaggtggataacgc

SEQ ID NO: 903 - DNA, 600 bp, synthetic construct
  misc_feature 1..600: note = Description of sequence: Sequence Name: 71281-18
  source 1..600: mol_type = other DNA
acttactagtgcgtgacgtattaatgcttattatatgggggatcaggactcctcagttcaccttctcacaatgaggctccctgctcagctcctggggctgctaatgctctgggtcccaggctccagtggggatgttgtgatgactcagtttccactctccctgcccgtcacccttggacagccggcctccatctcctgcaggtctagtcaaagcctcgtatacggtgatggaaatactttcttgagttggtttcaccagaggccaggccattctccaaggcgcctaatttttagggtgtctaaccgggactctggggtcccagacaggttcagcggcagcgggtcaggcactgatttcacactgaaaatcagtagggtggaggctgaggatgctggcatttattactgcatgcagggtacaaattggtggacgttcggcccagggaccaaggtggaaatcaaccgaactgtggctgcaccatctgtcttcatcttcccgccatctgatgagcagttgaaatctggaactgcctctgttgtgtgcctgctgaataacttctatcccagagaggccaaagtacagtggaaggtggataacgc

SEQ ID NO: 904 - DNA, 645 bp, synthetic construct
  misc_feature 1..645: note = Description of sequence: Sequence Name: 71281-19
  source 1..645: mol_type = other DNA
agcttcagctgtggtagagaagacaggattcaggacaatctccagcatggccggcttccctctcctcctcaccctcctcactcactgtgcagggtcctgggcccagtctgtgctgactcagccaccctcagcgtctgggacccccgggcagagggtcaccatctcttgttctggaagcaactccaacatcggaagtaattatatatactggtaccagcagctcccaggaacggcccccaaactcctcatctataggaatgatcagcggccctcaggggtccctgaccgattctctggctccaagtctggcacctcagcctccctggccatcagtgggctccggtccgaggatgaggctgattattactgtgcagcatgggatgacagcctgagtggtccggttttcggcggagggaccaagctgaccgtcctaggtcagcccaaggctgccccctcggtcactctgttcccgccctcctctgaggagcttcaagccaacaaggccacactagtgtgtctcataagtgacttctacccgggagccgtgacagtggcctggaaggcagatagcagccccgtcaaggcgggagtggagaccaccacaccctccaaacaaagcaacaacaagtacgcggccagcagcta

SEQ ID NO: 905 - DNA, 563 bp, synthetic construct
  misc_feature 1..563: note = Description of sequence: Sequence Name: 71281-20
  source 1..563: mol_type = other DNA
gagctacaacaggcaggcaggggcagcaagatggtgttgcagacccaggtcttcatttctctgttgctctggatctctggtgcctacggggacatcgtgatgacccagtctccagactccctggctgtgtctctgggcgagagggccaccatcaactgcaagtccagccagagtgttttaaacagctccaacaataagaactacttagcttggtaccagcagaaaccaggacagcctcctaagctcctcatttactggacatctacgcgggaatccggggtccctgaccgattcagtggcagcgggtctgggacagatttcactctcaccatcagcagcctgcaggctgaagatgtggcagtttattactgtcagcaatattatactactccggagttcggccaagggaccaaggtggaaataaaacgaactgtggctgcaccatctgtcttcatcttcccgccatctgatgagcagttgaaatctggaactgcctctgttgtgtgcctgctgaataacttctatcccagagaggccaaagtacagtggaaggtggataacgc

SEQ ID NO: 906 - DNA, 568 bp, synthetic construct
  misc_feature 1..568: note = Description of sequence: Sequence Name: 71281-21
  source 1..568: mol_type = other DNA
gggagagccctggggaggaactgctcagttaggacccagagggaaccatggaagccccagctcagcttctcttcctcctgctactctggctcccagataccaccggagacattgtgttgacacagtctccagccaccctgtccttgtctcctggggagagagccaccctctcctgcagggccagtcagagtgttagcagctacttagcctggtaccaacagaaacctggccaggctcccaggctcctcatctatgatgcatccaacagggccactggcatcccagccaggttcagtggcagtgggtctgggacagacttcactctcaccatcagcagcctagagcctgaagattttgcagtttattactgtcagcaacgtggcaactggcccccgatcaccttcggccgagggacacgactggagattaaacgaactgtggctgcaccatctgtcttcatcttcccgccatctgatgagcagttgaaatctggaactgcctctgttgtgtgcctgctgaataacttctatcccagagaggccaaagtacagtggaaggtggataacgc

SEQ ID NO: 907 - DNA, 649 bp, synthetic construct
  misc_feature 1..649: note = Description of sequence: Sequence Name: 71281-22
  source 1..649: mol_type = other DNA
agcttcagctgtgggtagagaagacaggactcaggacaatctccagcatggccagcttccctctcctcctcaccctcctcactcactgtgcagggtcctgggcccagtctgtgctgactcagccaccctcagcgtctgggacccccgggcagagggtcaccatctcttgttctggaagcagctccaacatcggaagtaatactgtaaactggtaccagcagctcccaggaacggcccccaaactcctcgtctatagtaatgatcttcggccctcaggggtccctgaccgattctctggctccaagtctggcacctcagcctccctggccatcagtgggctccagtctgaggatgaggctgattattactgtgcaacatgggatgacagcctgagtggtctttatgtcttcggaactgggaccaaggtcaccgtcctaggtcagcccaaggccaaccccactgtcactctgttcccgccctcctctgaggagctccaagccaacaaggccacactagtgtgtctgatcagtgacttctacccgggagctgtgacagtggcctggaaggcagatggcagccccgtcaaggcgggagtggagaccaccaaaccctccaaacagagcaacaacaagtacgcggccagcagcta

SEQ ID NO: 908 - DNA, 554 bp, synthetic construct
  misc_feature 1..554: note = Description of sequence: Sequence Name: 71281-23
  source 1..554: mol_type = other DNA
gaagagctgctcagttaggacccagagggaaccatggaaaccccagcgcagcttctcttcctcctgctactctggctcccagaaatcaccggagaaattgtgttgacgcagtctccaggcaccctgtctttgtctccaggggaaagagccaccctctcctgcagggccagtcagagtgttagtaacaacaatttagcctggtaccagcagaaccctggccagtctcccaggctcctcatctatgatgcatccaggagggccactggcatcccagacaggttcagtggcagtgggtctgggacagacttcactctcaccatcagcagactggagcctgaagattttgcagtgtattactgtcagcactatgataactcagtctggacgttcggccaagggaccaaggtggaaatcaaacgaactgtggctgcaccatctgtcttcatcttcccgccatctgatgagcagttgaaatctggaactgcctctgttgtgtgcctgctgaataacttctatcccagagaggccaaagtacagtggaaggtggataacgc

SEQ ID NO: 909 - DNA, 566 bp, synthetic construct
  misc_feature 1..566: note = Description of sequence: Sequence Name: 71281-24
  source 1..566: mol_type = other DNA
gagctacaacaggcaggcaggggcagcaagatggtgttgcagacccaggtcttcatttctctgttgctctggatctctggtgcctacggggacatcgtgatgacccagtctccagactccctggctgtgtctctgggcgagagggccaccatcaactgcaagtccagccagagtgttttatacagctccaacaataagaactacttagcttggtaccagcagaaaccaggacagcctcctaagctgctcatttactgggcatctacccgggaatccggggtccctgaccgattcagtggcagcgggtctgggacagatttcactctcaccatcagcagcctgcaggctgaagatgtggcagtttattactgtcagcaatattatagtgctccgtggacgttcggccaagggaccaaggtggaaatcaaacgaactgtggctgcaccatctgtcttcatcttcccgccatctgatgagcagttgaaatctggaactgcctctgttgtgtgcctgctgaataacttctatcccagagaggccaaagtacagtggaaggtggataacgc

SEQ ID NO: 910 - DNA, 568 bp, synthetic construct
  misc_feature 1..568: note = Description of sequence: Sequence Name: 71281-25
  source 1..568: mol_type = other DNA
tgggggatcaggactcctcagttcaccttctcacaatgaggctccctgctcagctcctggggctgctaatgctctgggtcccaggatccagcggggatgttgtgatgactcagtctccactctccctgcccgtcactattggacagccggcctccatctcctgcaggtctagtcaaagcctcgtatacagtgatggaaacacctacttgaattggtttcagcagaggccaggccaatctccaaggcgcctaatttataagctttctaaccgggactctggggtcccagacagattcaccggcagtgggtcaggcactgatttcacactgaaaatcagcagggtggaggctgaggatgttggggtttattactgcatgcaaggtacgcagtggccgtggacttttggccaggggaccaagctggagatcaaacgaactgtggctgcaccatctgtcttcatcttcccgccatctgatgagcagttgaaatctggaactgcctctgttgtgtgcctgctgaataacttctatcccagagaggccaaagtacagtggaaggtggataacgc

SEQ ID NO: 911 - DNA, 645 bp, synthetic construct
  misc_feature 1..645: note = Description of sequence: Sequence Name: 71281-26
  source 1..645: mol_type = other DNA
tgggggctggggtctcaggaggcagcgctctcgggacgtctccaccatggcctgggctctgctgctcctcaccctcctcactcagggcacagggtcctgggcccagtctgccctgactcagcctgcctccgtgtctgggtctcctggacagtcgatcaccatctcctgcactggaaccagcagtgacgttggtgcttataactatgtctcttggtgccagcagcacccaggcaaagcccccaaactcatcatttatgatgtcagtaagcggccctcaggggtttctgatcgcttctctggctccaagtctggcaacacggcctccctgaccatctctgggctccacactgaggacgaggctgattattactgctactcacttacgaccaccaccacttgggtgttcggcggagggaccaagctgaccgtcctaggtcagcccaaggctgccccctcggtcactctgttcccgccctcctctgaggagcttcaagccaacaaggccacactggtgtgtctcataagtgacttctacccgggagccgtgacagtggcctggaaggcagatagcagccccgtcaaggcgggagtggagaccaccacaccctccaaacaaagcaacaacaagtacgcggccagcagcta

SEQ ID NO: 912 - DNA, 635 bp, synthetic construct
  misc_feature 1..635: note = Description of sequence: Sequence Name: 71281-27
  source 1..635: mol_type = other DNA
tgagcgcagaaggcaggactcgggacaatcttcatcatgacctgctcccctctcctcctcacccttctcattcactgcacagggtcctgggcccagtctgtgttgacgcagccgccctcagtgtctgcggccccaggacagaaggtcaccatctcctgctctggaagcagctccaacattggcaataattatgtgtcctggtaccagcagttcccaggaacagcccccaaagtcctcatctatgaaaatgataagcgaccctcagggattcctgaccgattctctggctccaggtctggcacgtcagccaccctgggcatcaccggactccagactggggacgaggccgattattactgcggaacatgggatagcagcctgagtactgaagtgttcggcggagggaccaagctgaccgtcctaggtcagcccaaggctgccccctcggtcactctgttcccgccctcctctgaggagcttcaagccaacaaggccacactggtgtgtctcataagtgacttctacccgggagccgtgacagtggcctggaaggcagatagcagccccgtcaaggcgggagtggagaccaccacaccctccaaacaaagcaacaacaagtacgcggccagcagcta

SEQ ID NO: 913 - DNA, 564 bp, synthetic construct
  misc_feature 1..564: note = Description of sequence: Sequence Name: 71281-28
  source 1..564: mol_type = other DNA
gctacaacaggcaggcaggggcagcaagatggtgttgcagacccaggtcttcatttctctgttgctctggatctctggtgcctacggggacatcgtgatgacccagtctctagactccctggctgtgtctctgggcgagagggccaccatccactgcaagtccagccagagtgttttatacagctccaacaataagaactacttagcttggtaccagcataaaccaggacagcctcctaagctgctcatttactgggcatctacccgggaatccggggtccctgaccgattcagtggcagcgggtctgggacagatttcactctcaccatcagcagcctgcaggctgaagatgtggcagtttattactgtcagcaacattatagtactcctgttactttcggcggagggaccaaggtggagatcaaacgaactgtggctgcaccatctgtcttcatcttcccgccatctgatgagcagttgaaatctggaactgcctctgttgtgtgcctgctgaataacttctatcccagagaggccaaagtacagtggaaggtggataacgc

SEQ ID NO: 914 - DNA, 653 bp, synthetic construct
  misc_feature 1..653: note = Description of sequence: Sequence Name: 71281-29
  source 1..653: mol_type = other DNA
gctctgcttcagctgtgggcacaagaggcagcactcaggacaatctccagcatggcctggtctcctctcctcctcactctcctcgctcactgcacagggtcctgggcccagtctgtgctgacgcagccgccctcagtgtctggggccccagggcagagggtcaccatctcctgcactgggagcagctccaacatcggggcaggttatgatgtacactggtaccagcagtttccaggaacagcccccaaagtcctcatctatggtaatagcaatcggccctcaggggtccctgaccgattctctggctccaagtctggcacctcagcctccctggccatcactgggctccaggctgaggatgaggctgattattactgccagtcctatgacagcagcctgagtggttgggtgttcggcggagggaccaagctgaccgtcctaggtcagcccaaggctgccccctcggtcactctgttcccgccctcctctgaggagcttcaagccaacaaggccacactggtgtgtctcataagtgacttctacccgggagccgtgacagtggcctggaaggcagatagcagccccgtcaaggcgggagtggagaccaccacaccctccaaacaaagcaacaacaagtacgcggccagcagcta

SEQ ID NO: 915 - DNA, 555 bp, synthetic construct
  misc_feature 1..555: note = Description of sequence: Sequence Name: 71281-30
  source 1..555: mol_type = other DNA
ggggaggagtcagtcccaaccaggacacagcatggacatgagggtccctgctcagctcctggggctcctgctgctctggctctcagttgccagatgtgacatccggttgacccagtctccaacctccctgtctccatctgtcggagacagagtcatcatcacttgtcaggcgagtcagcacattggtacgtttttgagttggtatcagcaaaaaccaggacaagcccctaaactcctgatcaacgaagcatccaatttggagtcaggggtcccatcaaggttcagtggtagcggatctgggacatctttttctttcaccatcagcagcctgcagcctgaagatattgcaacatatttttgtcaacaatatgatgatttcccggtcactttcggcggagggaccaaggtgcagatcaaacgaactgtggctgcaccatctgtcttcatcttcccgccatctgatgagcagttgaaatctggaactgcctctgttgtgtgcctgctgaataacttctatcccagagaggccaaagtacagtggaaggtggataacgc

SEQ ID NO: 916 - DNA, 633 bp, synthetic construct
  misc_feature 1..633: note = Description of sequence: Sequence Name: 71281-31
  source 1..633: mol_type = other DNA
agtctgggcctaaggaagcagcactggtggtgcctcagccatggcctggaccgttctcctcctcggcctcctctctcactgcacaggctctgtgacctcctatgtgctgactcaaccaccctcggtgtcagtggccccagcacagacggccaggattacctgtgggggaaacaatattgaaagtaaaagtgtgcactggtaccagcagaagccaggccaggcccctgtgctggtcgtctatgaaaatagcgaccggccctcagggatccctgagcgattctctggctccaactcggggaacatggccaccctgaccatcagcagggtcgaagccggggatgaggccgactattactgtcaggtgtgggagagtagtagtgatcatgtgatattcggcggagggaccaagctgaccgtcctaggtcagcccaaggctgccccctcggtcactctgttcccgccctcctctgaggagcttcaagccaacaaggccacactggtgtgtctcataagtgacttctacccgggagccgtgacagtggcctggaaggcagatagcagccccgtcaaggcgggagtggagaccaccacaccctccaaacaaagcaacaacaagtacgcggccagcagcta

SEQ ID NO: 917 - DNA, 637 bp, synthetic construct
  misc_feature 1..637: note = Description of sequence: Sequence Name: 71281-32
  source 1..637: mol_type = other DNA
gctggggtctcaggaggcagcgctctcaggacatctccaccatggcctgggctctgctgctcctcaccctcctcactcagggcacagggtcctgggcccagtctgccctgactcagcctgcctccgtgtctgggtctcctggacagtcgatcaccatctcctgcactgcaaccagcagtgacgttggtgcttataactatgtctcctggtaccaacaccacccaggcaaagcccccaaactcatgatttatgaggtcactaatcggccctcaggggtttctaatcgcttctctggctccaagtctggcaacacggcctccctgaccatctctgggctccaggctgaggacgaggctgattattactgcagctcatatacaaccagcagcgtggttttcggcggagggaccaagctgaccgtcctaggtcagcccaaggctgccccctcggtcactctgttcccgccctcctctgaggagcttcaagccaacaaggccacactggtgtgtctcataagtgacttctacccgggagccgtgacagtggcctggaaggcagatagcagccccgtcaaggcgggagtggagaccaccacaccctccaaacaaagcaacaacaagtacgcggccagcagcta

SEQ ID NO: 918 - DNA, 544 bp, synthetic construct
  misc_feature 1..544: note = Description of sequence: Sequence Name: 71281-33
  source 1..544: mol_type = other DNA
ggagtcagactcagtcaggacacagcatggacatgagggtccccgctcagctcctggggctcctgctgctctggctcccaggtgccaaatgtgacacccagatgacccagtctccttccatcctgtctgcatctgtaggagacagagtcaccatcacttgccgggccagtcagggtattagtacgttcttggcctggtatcagcagaaaccagggaaagcccctaagctcctgatctatgatgcctccagtttggaaagtggggtcccatcaaggttcagcggcagtggatctgggacagaattcactctcaccatcaccaccctgcagcctgatgatcttgcaacttattactgccaacagtataatacgtacacttttggccaggggaccaagctggagatcaaacgaactgtggctgcaccatctgtcttcatcttcccgccatctgatgagcagttgaaatctggaactgcctctgttgtgtgcctgctgaataacttctatcccagagaggccaaagtacagtggaaggtggataacgc

SEQ ID NO: 919 - DNA, 544 bp, synthetic construct
  misc_feature 1..544: note = Description of sequence: Sequence Name: 71281-34
  source 1..544: mol_type = other DNA
agtcccagtcaggacacagcatggacatgagggtccccgctcagctcctggggctcctgctgctctggctcccaggtgccagatgtgacatccagttgacccagtctccatccttcctgtctgcatctgtaggagacagagtcaccatcgcttgccgggccagtcagggcattgctggttatttagcctggtatcagcaaaagccagggaaagcccctgccctcctgatctatgctgcatccactttgcaaagtggggtcccatcaaggttcggcggcagtggatctgggacagaattcactctcacaatcagcaacctgcagcctgaagattttggaactttttactgtcaacaggttaatagttatcctcggacgttcggccaagggaccaaggtggaaatcaaacgaactgtggctgcaccatctgtcttcatcttcccgccatctgatgagcagttgaaatctggaactgcctctgttgtgtgcctgctgaataacttctatcccagagaggccaaagtacagtggaaggtggataacgc

SEQ ID NO: 920 - DNA, 555 bp, synthetic construct
  misc_feature 1..555: note = Description of sequence: Sequence Name: 71281-35
  source 1..555: mol_type = other DNA
ggggaggagtcagtcccaaccaggacacagcatggacatgagggtccctgctcagctcctggggctcctgctgctctggctctcaggtgccagatgtgacatccagatgacccagtctccatcctccctgtctgcatctgtaggagacagagtcaccatcacttgccaggcgagtcaggacattagcaagtatttaaattggtatcagcagagaccagggaaagcccctaagctcctgatctacgatgcatccaatttgggaacaggggtcccatcaaggttcagtggaagtggatctgggacagattttactttcaccatcagcagcctgcagcctgaagatattgcaacatattactgtcaacagtatgataatttacctcgcacttttggccaggggaccaagctggagatcaaacgaactgtggctgcaccatctgtcttcatcttcccgccatctgatgagcagttgaaatctggaactgcctctgttgtgtgcctgctgaataacttctatcccagagaggccaaagtacagtggaaggtggataacgc

SEQ ID NO: 921 - DNA, 554 bp, synthetic construct
  misc_feature 1..554: note = Description of sequence: Sequence Name: 71281-36
  source 1..554: mol_type = other DNA
gaagagctgctcagttaggacccagagggaaccatggaaaccccagcgcagcttctcttcctcctgctactctggctcccagataacatcggagaggttgtgttgacgcagtctccaggcaccctgtctttgtctccaggggaaagtgccaccctctcctgcagggccagtcagagtgttaggagcgactactttgcctggtaccagcagaaacctggccaggctcccaggctcctcatctatgctgcatcccggagggccactgccatcccagacaggttcagtggcagtgggtctgggacagacttcactctcaacatcagcagactggagcctgaagatttcgcagtgtattcctgtcagcagtatagtaggtcaccgtacagttttggccaggggaccaagctggagatcagacgaactgtggctgcaccatctgtcttcatcttcccgccatctgatgagcagttgaaatctggaactgcctctgttgtgtgcctgctgaataacttctatcccagagaggccaaagtacagtggaaggtggataacgc

SEQ ID NO: 922 - DNA, 550 bp, synthetic construct
  misc_feature 1..550: note = Description of sequence: Sequence Name: 71281-37
  source 1..550: mol_type = other DNA
ggagtcagtcccaaccaggacacagcatggacatgagggtccctgctcagctcctggggctcctgctgctctggctctcaggtgccagatgtgacatccagatgacccagtctccatcctccctgtctgcatctgtaggagacagagtcaccatcacttgccaggcgagtcaggacattagaaactttttaaattggtatcagcagaaaccagggaaagcccctaaactcctgatctacgatgcatccaatttggaaacaggggtcccatcaaggttcaggggaactggatctgggacagattttactttcaccatcagcagcctgcagcctgaagatattgcaacatattactgtcaacagtatgataatctcccaatgaccttcggccaagggacacgactggagattagacgaactgtggctgcaccatctgtcttcatcttcccgccatctgatgagcagttgaaatctggaactgcctctgttgtgtgcctgctgaataacttctatcccagagaggccaaagtacagtggaaggtggataacgc

SEQ ID NO: 923 - DNA, 646 bp, synthetic construct
  misc_feature 1..646: note = Description of sequence: Sequence Name: 71281-38
  source 1..646: mol_type = other DNA
agcttcagctgtgggtagagaagacaggactcaggacaatctccagcatggccagcttccctctcctcctcaccctcctctctcactgtgcagggtcctgggcccagtctgtgctgactcaggcaccctcagcgtctgggacccccgggcagagggtcaccatctcctgttctggaagcagctccaacatcggaagtaatactgtcagctggtaccagcagctcccaggaacggcccccaaagtcctcatttatagtaataagcagcggccctcaggggtccctgaccgattctctggctccaagtctgacacctcagcctccctggccatcagtgggctccagtctgaggatgaggctgattattactgtgcagcatgggatgacagcctgaatggtcgggtgttcggcggagggaccaggctgaccgtcctaggtcagcccaaggctgccccctcggtcactctgttcccgccctcctctgaggagcttcaagccaacaaggccacactggtgtgtctcataagtgacttctacccgggagccgtgacagtggcctggaaggcagatagcagccccgtcaaggcgggagtggagaccaccataccctccaaacaaagcaacaacaagtacgcggccagcagcta

SEQ ID NO: 924 - DNA, 556 bp, synthetic construct
  misc_feature 1..556: note = Description of sequence: Sequence Name: 71281-39
  source 1..556: mol_type = other DNA
tggggaggaatcagtcccactcaggacacagcatggacatgagggtccccgctcagctcctggggctcctgctgctctggttcccgggtgccaggtgtgacatccaaatgacccagtctccatcctccctgtctgcatctgtaggagacagagtcaccatcacttgccgggcaagtcaagacattagagatgatttagcctggtatcagcagaaaccagggagagcccctaagcgcctgatctatgctgcatccaatttgcaaggtggggtcccatcaaggttcagcggcagtggatctgggacagaattcactctcacaatcagcaggctgcagcctgaagattttgcaagttattactgtctacagcataatactttcccgtacagttttggccaggggaccaagctggagatcaagcgaactgtggctgcaccatctgtcttcatcttcccgccatctgatgagcagttgaaatctggaactgcctctgttgtgtgcctgctgaataacttctatcccagagaggccaaagtacagtggaaggtggataacgc

SEQ ID NO: 925 - DNA, 653 bp, synthetic construct
  misc_feature 1..653: note = Description of sequence: Sequence Name: 71282-1
  source 1..653: mol_type = other DNA
gctctgcttcagctgtgggcacaagaggcagcactcaggacaatctccagcatggcctggtctcctctcctcctcactctcctcgctcactgcacagggtcctgggcccagtctgtgctgacgcagccgccctcagtgtctggggccccagggcagagggtcaccatctcctgcactgggagcagctccaacatcggggcaggttatgatgtacactggtaccagcagcttccaggaacagcccccaaactcctcatctatggtaacatcaatcggccctcaggggtccctgaccgattctctggctccaagtctggcacctcagcctccctggccatcactgggctccaggctgaggatgaggctgattattactgccagtcctacgacagcagcttgagtggttcggtattcggcggagggaccaaactgaccgtcctaggtcagcccaaggctgccccctcggtcactctgttcccgccctcctctgaggagcttcaagccaacaaggccacactggtgtgtctcataagtgacttctacccgggagccgtgacagtggcctggaaggcagatagcagccccgtcaaggcgggagtggagaccaccacaccctccaaacaaagcaacaacaagtacgcggccagcagcta

SEQ ID NO: 926 - DNA, 565 bp, synthetic construct
  misc_feature 1..565: note = Description of sequence: Sequence Name: 71282-2
  source 1..565: mol_type = other DNA
gggagagccctggggaggaactgctcagttaggacccagagggaaccatggaagccccagctcagcttctcttcctcctgctactctggctcccagatgccgccggagaaattgtgttgacacagtctccagccaccctgtctttgtctccaggggaaagagccaccctctcctgcagggccagtcagagtgttagcagctacttagcctggtaccaacagaaacctggccaggctcccaggctcctcatccatgatgcatccaacagggccactggcaccccagccaggttcagtggcagtgggtctgggacagacttcactctcaccgtcagcagcctagagcctgaggattttgcagtttattactgtcagcagcgtaaggactggcctctaacttttggccaggggaccaggttagagatcaaacgaactgtggctgcaccatctgtcttcatcttcccgccatctgatgagcagttgaaatctggaactgcctctgttgtgtgcctgctgaataacttctatcccagagaggccaaagtacagtggaaggtggataacgc

SEQ ID NO: 927 - DNA, 653 bp, synthetic construct
  misc_feature 1..653: note = Description of sequence: Sequence Name: 71282-3
  source 1..653: mol_type = other DNA
gctctgcttcagctgtgggcacaagaggcagcactcaggacaatctccagcatggcctggtctcctctcctcctcactctcctcgctcactgcacagggtcctgggcccagtctgtgctgacgcagccgccctcagtgtctggggccccagggcagagtgtcaccatctcctgcactgggagcaactccaacatcggggcaggttatgatgtgaattggtaccagcagattcctggaacagcccccaaactcctcatctatggtcacatcaatcggccctcaggggtccctgaccgattctctggctccaagtctggcacctcagcctccctggccatcactgggctccaggctgaggatgaggctgattattactgccagtcctatgacagcagcctgagtgggtcggtgttcggcggggggaccaagctgaccgtcctaggtcagcccaaggctgccccctcggtcactctgttcccgccctcctctgaggagcttcaagccaacaaggccacactggtgtgtctcataagtgacttctacccgggagccgtgacagtggcctggaaggcagatagcagccccgtcaaggcgggagtggagaccaccacaccctccaaacaaagcaacaacaagtacgcggccagcagcta

SEQ ID NO: 928 - DNA, 553 bp, synthetic construct
  misc_feature 1..553: note = Description of sequence: Sequence Name: 71282-4
  source 1..553: mol_type = other DNA
ggaggaatcagtcccactcaggacacagcatggacatgagggtccccgctcagctcctggggctcctgctgctctggttcccaggtgccaggtgtgacatccagatgacccagtctccatctgccatgtctgcatctgtaggagacagagtcaccatcacttgtcgggcgagtcaggacattaacatttatttagcctggtttcagcagaaaccagggaaagtccctaagcgcctgatctatgctgcatccaatttgcaaagtggggtcccatcaaggttcagcggcagggggtctggggcagaattcactctcacaatcagcagcctgcagcctgaagattttgcaacttattactgtctacaacataataattacccttggacgttcggccaagggaccaaggtggcattcaaacgaactgtggctgcaccatctgtcttcatcttcccgccatctgatgagcagttgaaatctggaactgcctctgttgtgtgcctgctgaataacttctatcccagagaggccaaagtacagtggaaggtggataacgc

SEQ ID NO: 929 - DNA, 636 bp, synthetic construct
  misc_feature 1..636: note = Description of sequence: Sequence Name: 71282-5
  source 1..636: mol_type = other DNA
gctgtgctgtgggtccaggaggcagaactctgggtgtctcaccatggcctggatccctctacttctccccctcctcactctctgcacaggctctgcggcctcctatgagctgacacagccaccgtcggtgtcagtgtccccaggacagacggccaggatcacctgctctggagatgcattgccaatgcaatatggttattggtaccagcagaagccaggccaggcccctgtgttggtgataaagaaagacagagagaggccctcagggatccctgagcgattctctggctccggctcagggacaacactcacgttgaccatcagtagagtccaggcagaagacgaggctgactatttctgtcagtcagcagacagaagtggaaaatatgtagttttcggcggagggaccaaactgaccgtcctaggtcagcccaaggctgccccctcggtcactctgttcccgccctcctctgaggagcttcaagccaacaaggccacactggtgtgtctcataagtgacttctacccgggagccgtgacagtggcctggaaggcagatagcagccccgtcaaggcgggagtggagaccaccacaccctccaaacaaagcaacaacaagtacgcggccagcagcta

SEQ ID NO: 930 - DNA, 639 bp, synthetic construct
  misc_feature 1..639: note = Description of sequence: Sequence Name: 71282-6
  source 1..639: mol_type = other DNA
gctgcgggtagagaagacaggactcaggacaatctccagcatggcctggtcccctctcttcctcaccctcatcactcactgtgcagggtcctgggcccagtctgtgctgactcagccaccctcggtgtctgaagcccccaggcagagggtcaccatctcctgttctggaagcagctccaacatcggaaataatgctgtaaactggtaccagcagctcccaggaaaggctcccaaactcctcatctattataatgatctgctgccctcaggggtctctgaccgattctctggctccaagtctggcacctcagcctccctggccatcagtgggctccagtctgaggatgaggctgattattactgtgcaacatgggatgacagcctgaatgcctgggtgttcggcggagggaccaagctgaccgtcctaggtcagcccaaggctgccccctcggtcactctgttcccaccctcctctgaggagcttcaagccaacaaggccacactggtgtgtctcataagtgacttctacccgggagccgtgacagtggcctggaaggcagatagcagccccgtcaaggcgggagtggagaccaccacaccctccaaacaaagcaacaacaagtacgcggccagcagcta

SEQ ID NO: 931 - DNA, 554 bp, synthetic construct
  misc_feature 1..554: note = Description of sequence: Sequence Name: 71282-7
  source 1..554: mol_type = other DNA
ggagaagagctgctcagttaggacccagagggaaccatggaaaccccagcgcagcttctcttcctcctgctactctggctcccagataccaccggagaaattgtgttgacgcagtctccaggcaccctgtctttgtctccaggggaaagagccaccctctcctgcagggccagtcagagtgttagcagcagctacttagcctggtaccagcagaaacctggccaggctcccaggctcctcatctatggtgcatccagcagggccactggcatcccagacaggttcagtggccgtgggtctgggacagacttcactctcaccgtcagcagactggagcctgaagattttgcagtgtattactgtcagcactatggtagctcattcactttcggccctgggaccaaagtggagatcaaaggaactgtggctgcaccatctgtcttcatcttcccgccatctgatgagcagttgaaatctggaactgcctctgttgtgtgcctgctgaataacttctatcccagagaggccaaagtacagtggaaggtggataacgc

SEQ ID NO: 932 - DNA, 562 bp, synthetic construct
  misc_feature 1..562: note = Description of sequence: Sequence Name: 71282-8
  source 1..562: mol_type = other DNA
atatggggaggagtcagtctcagtcaggacacagcatggacatgagggtccccgctcagctcctggggctcctgctactctggctccgaggtgccagatgtgacatccagatgacccagtctccatcctccctgtctgcatctgtaggagacagagtcaccatcacttgccgggcaagtcagagcattaacacctatttaaattggtatcagcagaaaccagggaaagcccctaaggtcctgatctatgctgcatccagtttgcaaagtggggtcccatcaaggttcagtggaagtggatctgggacagatttcactctcaccatcagcagtctgcaacctgaagattttgcaacttactactgtcaacagagttacagtacccccatgtacacttttggccaggggaccaagctggagatcaaacgaactgtggctgcaccatctgtcttcatcttcccgccatctgatgagcagttgaaatctggaactgcctctgttgtgtgcctgctgaataacttctatcccagagaggccaaagtacagtggaaggtggataacgc

SEQ ID NO: 933 - DNA, 554 bp, synthetic construct
  misc_feature 1..554: note = Description of sequence: Sequence Name: 71282-9
  source 1..554: mol_type = other DNA
gaagagctgctcagttaggacccagagggaaccatggaaaccccagcgcagcttctcttcctcctgctactctggctcccagataccaccggagaaattgtgttgacgcagtctccaggcaccctgtctttgtctccaggggaaagagtcaccctctcctgcagggccagtcaatattttagcagcagtcacttagcctggtaccagcatagacctggccaggctcccaggctcctcatgtatggtgcatcctacagggccactggcatcccagacaggttcagtggcagtgtgtctgggacagacttcactctcaccatcagcagactggagcctgaagatttagcagtgtattactgtcagtactatggtaactcacctaggacttttggccaggggaccaagctggagatcaaacgaactgtggctgcaccatctgtcttcatcttcccgccatctgatgagcagttgaaatctggaactgcctctgttgtgtgcctgctgaataacttctatcccagagaggccaaagtacagtggaaggtggataacgc

SEQ ID NO: 934 - DNA, 557 bp, synthetic construct
  misc_feature 1..557: note = Description of sequence: Sequence Name: 71282-10
  source 1..557: mol_type = other DNA
gaagagctgctcagttaggacccagagggaaccatggaaaccccagcgcagcttctcttcctcctgctactctggctcccagataccaccggagaaattgtgttgacgcagtctccaggcaccctgtctttgtctccaggggaaagagtcaccctctcctgcagggccagtcagggtgttagcagcaactacttagcctggtaccagcagaaacctggccaggctcccaggctcctcatctatggtgcatccagcagggccactggcgtcccagacaggttcagtggcagtgggtctgggacagacttcactctcaccatcagcggactggagcctgaggattttgcagtgtattactgtcagcagtatggtagctcacccatgtacacttttggccaggggaccaagctggagatcaaacgaactgtggctgcaccatctgtcttcatcttcccgccatctgatgagcagttgaaatctggaactgcctctgttgtgtgcctgctgaataacttctatcccagagaggccaaagtacagtggaaggtggataacgc

SEQ ID NO: 935 - DNA, 630 bp, synthetic construct
  misc_feature 1..630: note = Description of sequence: Sequence Name: 71282-11
  source 1..630: mol_type = other DNA
agcagagctctggggagtctgcaccatggcttggaccccactcctcttcctcaccctcctcctccactgcacagggtctctctcccagcttgtgctgactcaatcgccctctgcctctgcctccctgggagcctcggtcaacctcacctgcactctgagcagtgggcacagcagctacgccatcgcatggcatcagcagcagccagagaagggccctcggttcttgatgaggcttaacagtgatggcagccacaccaagggggacgggatccctgatcgcttctcaggctccagctctggggctgcgcgctacctcaccatctccagcctccagtctgaggatgaggctgactattactgtcagacctggggcactggcattcgagtgttcggcggagggaccaagctgaccgtcctaggtcagcccaaggctgccccctcggtcactctgttcccgccctcctctgaggagcttcaagccaacaaggccacactggtgtgtctcataagtgacttctacccgggagccgtgacagtggcctggaaggcagatagcagccccgtcaaggcgggagtggagaccaccacaccctccaaacaaagcaacaacaagtacgcggccagcagcta

SEQ ID NO: 936 - DNA, 589 bp, synthetic construct
  misc_feature 1..589: note = Description of sequence: Sequence Name: 71282-12
  source 1..589: mol_type = other DNA
catcggggtacagacgcagcgtgaattttcttagtggggggagtcagtctcagtcaggacacagcatggacatgagggtccccgctcagctcctggggctcctgctactctggctccgaggtgccagatgtgacatccagatgacccagtctccatcctccctgtctgcatctgtaggagacagagtcaccatcacttgccgggcaagtcagagcattagcagctatttaaattggtatcagcagaaaccagggaaagcccctaacctcctgatctacgctgcatccagtttgcaaagtggggtcccatcaaggttcagtggcagtggatctgggacagatttcactctcaccatcagcagtctgcaacctgaagattttgcaacttactactgtcaacaggattacagtacccctcaaacgttcggccaagggaccaaggtggaaatcaaacgaactgtggctgcaccatctgtcttcatcttcccgccatctgatgagcagttgaaatctggaactgcctctgttgtgtgcctgctgaataacttctatcccagagaggccaaagtacagtggaaggtggataacgc

SEQ ID NO: 937 - DNA, 630 bp, synthetic construct
  misc_feature 1..630: note = Description of sequence: Sequence Name: 71282-13
  source 1..630: mol_type = other DNA
agtctgggcctaaggaagcagcactggtggtgcctcagccatggcctggaccgttctcctcctcggcctcctctctcactgcacaggctctgtgaactcctatgtgctgactcagccaccctcagtgtcagtggccccaggaaagacggccacgattacctgtgggggtgacaacattggaagtaaaagcgtacactggtaccaacagaagccaggccaggcccctgtgctggtcattaatgatgatggcgaccggccctcagggatccctgagcgattttctggctccaagtctgcgaacacggccaccctgaccatcagcagggtcgaagccggggatgaggccgactaccactgtcaggtgtgggatcccaagactgattatgtcttcgcaggtgggacccaggtcaccgtcctaggtcagcccaaggccaaccccactgtcactctgttcccgccctcctctgaggagctccaagccaacaaggccacactagtgtgtctgatcagtgacttctacccgggagctgtgacagtggcctggaaggcagatggcagccccgtcaaggcgggagtggagaccaccaaaccctccaaacagagcaacaacaagtacgcggccagcagcta

SEQ ID NO: 938 - DNA, 645 bp, synthetic construct
  misc_feature 1..645: note = Description of sequence: Sequence Name: 71282-14
  source 1..645: mol_type = other DNA
agcttcagctgtggtagagaagacaggattcaggacaatctccagcatggccggcttccctctcctcctcaccctcctcactcactgtgcagggtcctgggcccagtctgtgctgactcagccaccctcagcgtctgggacccccgggcagagggtcaccatctcttgttctggaagcagctccaacatcgaaagtaattatgtatactggtaccagcagctcccaggaatggcccccaaactcctcatctatagcaatgctcagcggccctcaggggtccctgaccggttctctggctccaagtctggcacctcagcctccctggccatcagtgggctccggtccgaggatgaggctgattattactgtgcagcatgggatgacagcctgagtggttatgtcttcggaactgggaccaaggtcaccgtcctaggtcagcccaaggccaaccccactgtcactctgttcccgccctcctctgaggagctccaagccaacaaggccacactagtgtgtctgatcagtgacttctacccgggagctgtgacagtggcctggaaggcagatggcagccccgtcaaggcgggagtggagaccaccaaaccctccaaacagagcaacaacaagtacgcggccagcagcta

SEQ ID NO: 939 - DNA, 587 bp, synthetic construct
  misc_feature 1..587: note = Description of sequence: Sequence Name: 71282-15
  source 1..587: mol_type = other DNA
cgagcactcaagcctatgttaacttttttcttctctggggggagtcagtctcagtcaggacacagcatggacatgagggtccccgctcagctcctggggctcctgctactctggctccgaggtgccagatgtgacgtccagatgacccagtctccatcctccctgtctgcatttgtaggtgacagagtcaccatcacttgccgggcaagtcagagcattaatgcctatttgaattggtatcagcaaaaaccaggaaaagcccctaaactcctgatctatgctgcatccagtttgcaaagtggggtcacgtcaagattcagtggcagtggatttgggacagaattcactctcgctatcgacagtctgcaacctgaggattttgcaacttactactgtcaacagagttacagtccccccactttcggcggagggaccagggtggagatcagacgaactgtggctgcaccatctgtcttcatcttcccgccatctgatgagcagttgaaatctggaactgcctctgttgtgtgcctgctgaataacttctatcccagagaggccaaagtacagtggaaggtggataacgc

SEQ ID NO: 940 - DNA, 636 bp, synthetic construct
  misc_feature 1..636: note = Description of sequence: Sequence Name: 71282-16
  source 1..636: mol_type = other DNA
ctgggcctcaggaagcagcatcggaggtgcctcagccatggcatggatccctctcttcctcggcgtccttgcttactgcacagttttaatggcctcctatgaactgactcagccaccctcagtgtccgtgtccccaggacagacagcttccatcacctgttctggagataaattggacaataaattggatattagatatacttgttggtatcaacagaaggcaggccagccccctgtgttgctcatttatcagggtactgagcggccctcagggatctctgaacgattctctgtctccgactctgggaacacagtcactctgaccatcagcgggacccagtctatggatgaggcggactattactgtcagacgtgggacttcactcatgtggttttcggcggggggaccaagctgaccgtcctaagtcagcccaaggctgccccctcggtcactctgttcccgccctcctctgaggagcttcaagccaacaaggccacactggtgtgtctcataagtgacttctacccgggagccgtgacagtggcctggaaggcagatagcagccccgtcaaggcgggagtggagaccaccacaccctccaaacaaagcaacaacaagtacgcggccagcagcta

SEQ ID NO: 941 - DNA, 551 bp, synthetic construct
  misc_feature 1..551: note = Description of sequence: Sequence Name: 71282-17
  source 1..551: mol_type = other DNA
gaagagctgctcagttaggacccagagggaaccatggaaaccccagcgcagcttctcttcctcctgctactctggctcccagataccaccggagaaattgtgttgacgcagtctccagacaccctgtctttgcctccaggtgaaagagccaccctctcctgcagggccagtcaggctgttagtagaagtaaggtggcctggtatcagcacaaacctggccaggctcccaggctcctcatctatgatgcatccagcagggccactgacatcccagacagattcagtggcagtgggtctgggacagacttcactctcaccatcagcagactggaccctgaagacttcgcagtgtattactgtcaggaatatgctagcgggtacacttttggccaggggaccaagctggaagtcaaacgaactgtggctgcaccatctgtcttcatcttcccgccatctgatgagcagttgaaatctggaactgcctctgttgtgtgcctgctgaataacttctatcccagagaggccaaagtacagtggaaggtggataacgc

SEQ ID NO: 942 - DNA, 563 bp, synthetic construct
  misc_feature 1..563: note = Description of sequence: Sequence Name: 71282-18
  source 1..563: mol_type = other DNA
gatcagggcttctcagttcatcttctcaccatgaggctccccgctcagctcctggggctgctaatgctctggatacctggatccagtgcagattttttgatgacccagactccactctctctgtccgtcacccctggacagtcggcctccatctcctgcaagtctagtcagagcctcctgcatagtgatggaaagacctatttgtattggtacctgcagaagccaggccagtctccacagctcctgatctatgaagtttccaaccggttctctggagtgccagataggttcagtggcagcgggtcagggacagatttcacactgaaaatcagccgggtggaggctgaggatgttggggtttattactgcatgcaaaatatacagcttctgtacacttttggccaggggaccaagctggagatcaaacgaactgtggctgcaccatctgtcttcatcttcccgccatctgatgagcagttgaaatctggaactgcctctgttgtgtgcctgctgaataacttctatcccagagaggccaaagtacagtggaaggtggataacgc

SEQ ID NO: 943 - DNA, 547 bp, synthetic construct
  misc_feature 1..547: note = Description of sequence: Sequence Name: 71282-19
  source 1..547: mol_type = other DNA
ggagtcagacccagtcaggacacagcatggacatgagggtccccgctcagctcctggggctcctgctgctctggctcccaggtgccagatgtgacatccagatgacccagtctccttccaccctgtctgcatctgtgggagacagagtcaccatcacttgccggcccagtcagagtattagtcagtggttggcctggtaccagcagaaaccagggaaagccccaaagctcctaatctttaaggcatctactttagaaagtggggtcccgtcaaggttcagcggcagtggctctgggacagaattcactctcactatcagcagtctgcagcctgatgattttgcaacttattactgccaacagtatataagttttccgacttttggccaggggaccaagctggagatcagacgaactgtggctgcaccatctgtcttcatcttcccgccatctgatgagcagttgaaatctggaactgcctctgttgtgtgcctgctgaataacttctatcccagagaggccaaagtacagtggaaggtggataacgc

SEQ ID NO: 944 - DNA, 630 bp, synthetic construct
  misc_feature 1..630: note = Description of sequence: Sequence Name: 71282-20
  source 1..630: mol_type = other DNA
tgggggctgtgggtccaggaggcagaactctgggtgtctcaccatggcctggatccctctacttctccccctcctcactctctgcacaggctctgaggcctcctatgagctgacacagccaccctcggtgtcagtgtccccaggacagacggccaggatcacctgctctggagatgcatggccaaagcaatatgcttattggtaccagcagaagccaggccagtcccctgtgttggtgatatataaagacagtgagaggccctcagggatccctgagcgattctctggctccagctcagggacaacagtcacgttgaccatcagtggagtccaggcagaagacgaggctgactattactgtcaatcagcagacagcagaggtgtggtattcggcggagggaccaggctgaccgtcctaggtcagcccaaggctgccccctcggtcactctgttcccgccctcctctgaggagcttcaagccaacaaggccacactggtgtgtctcataagtgacttctacccgggagccgtgacagtggcctggaaggcagatagcagccccgtcaaggcgggagtggagaccaccacaccctccaaacaaagcaacaacaagtacgcggccagcagcta

SEQ ID NO: 945 - DNA, 331 bp, synthetic construct
  misc_feature 1..331: note = Description of sequence: Sequence Name: 71281-1
  source 1..331: mol_type = other DNA
cagtctgtgttgacgcagccgccctcagtgtctgcggccccaggacagaaggtcaccatctcctgctctggaagcagctccaacattggcaataattatgtatcctggtaccagcagctcccaggaacagcccccaaactcctcatctatgaaaataataagcgaccctcagggattcctgaccgattctctggctccaagtctggcacgtcagccaccctgggcatcaccgggctccagactggggacgaggccgatttttactgcggaacatgggatagcagcctgagtgcttttgtcttcggaactgggaccaaggtcaccgccctag

SEQ ID NO: 946 - DNA, 340 bp, synthetic construct
  misc_feature 1..340: note = Description of sequence: Sequence Name: 71281-2
  source 1..340: mol_type = other DNA
gacatcgtgatgacccagtctccagactccctggctgtgtctctgggcgagggggccaccgtcaactgcaagtccagccagagtgttttctacagctccaccaataacagctacttagcttggtaccagcagaaaccaggacagcctcctaagttactcatttattgggcatctacccgggaatccggggtccctgaccgattcagtggcagcgggtctgggacagatttcactctcaccatcagtagcctccaggctgaagatgtggcagtttattactgtcaacaatattataacactcccctcactttcggcggagggaccagggtggagatcaaac

SEQ ID NO: 947 - DNA, 319 bp, synthetic construct
  misc_feature 1..319: note = Description of sequence: Sequence Name: 71281-3
  source 1..319: mol_type = other DNA
tcctatgagctgactcagccaccctcagtgtccgtgtccccaggacagacagccagcatcacctgctctggagataaattgggggataagtttgtttgctggtatcagcagaagccaggcctgtcccctctactggtcatctatcaagataacaagcggccctcagggatccctgagcgattctctggctccaactctgggaacacagccactctgaccatcagcgggacccaggccatggatgaggctgactatttttgtcaggcgtgggctagtagcactgcgatattcggcggagggaccaagctgaccgtcctac

SEQ ID NO: 948 - DNA, 325 bp, synthetic construct
  misc_feature 1..325: note = Description of sequence: Sequence Name: 71281-4
  source 1..325: mol_type = other DNA
gaaatagtgatgacgcagtctccagccaccctgtctgtgtctccaggggaaagagccaccctctcctgcagggccagtcagagtgttagcagcaacttagcctggtaccagcagaaacctggccaggctcccaggctcctcatctatggtgcatcctccagggccactggtatcccagccagattcagtggcagtgggtctgggacagagttcactctcaccatcagcagcctgcagtctgaagattttgcagtttattactgtcagcagtataataactggccttcgtacacttttggccaggggaccaagttggagatcaaac

SEQ ID NO: 949 - DNA, 331 bp, synthetic construct
  misc_feature 1..331: note = Description of sequence: Sequence Name: 71281-5
  source 1..331: mol_type = other DNA
cagtctgtgttgacgcagccgccctcagtgtctgcggccccaggacagaaggtcaccatctcctgctctggaagcagctccaacattgagaagaattatgtatcctggtaccagctcctcccaggaagagcccccaaactcctcatccatcaaaatagtaagcgaccctcagggattcctgaccgattctctggctccaagtctggcacgtcagccaccctgggcatcaccggactccagactggggacgaggccgattattactgcggaacatgggatagcagcctgagagctgtggtattcggcggagggaccaagctgaccgtcctag

SEQ ID NO: 950 - DNA, 322 bp, synthetic construct
  misc_feature 1..322: note = Description of sequence: Sequence Name: 71281-6
  source 1..322: mol_type = other DNA
gacatccagatgacccagtctccatcctccctgtctgcatctgtaggagacagagtcaccatcacttgccaggcgagtcaggacattaacaattatttaaattggtatcaacagaaaccagggaaagcccctaaactcctgatctacgatgcatccaatttggatacaggggtcccatcaaggttcagcggaagtggatctgggacagattttactttcaccatcagcagcctgcagcctgaagatgttgcaacatattactgtcaacagtatgagaatctgatattcactttcggccctgggaccaaagtggatgtcaaac

SEQ ID NO: 951 - DNA, 325 bp, synthetic construct
  misc_feature 1..325: note = Description of sequence: Sequence Name: 71281-7
  source 1..325: mol_type = other DNA
tcccatgagctgacacagccaccctcggtgtcagtgtccccaagacagacggccaggatcacctgctctggagataatttgccaaagcagtatacttattggtaccagcagaagccaggccaggcccctctgttggtgatatataaagacagtgagaggccctctgggattcctgagcgattctctggctccagctcagggactacagtcacgttgaccatcagtggagtccaggcagaagacgaggctgactattactgtcagtcagcagacaccggtggaacttttgtggtcttcggcggagggaccaagctgagcgtcctag

SEQ ID NO: 952 - DNA, 325 bp, synthetic construct
  misc_feature 1..325: note = Description of sequence: Sequence Name: 71281-8
  source 1..325: mol_type = other DNA
gacatccagatgacccagtctccatcctccctgtctgcatctgtaggagacagggtcaccatcacttgccgggcaagtcagagcattgccaggtttttaaattggtatcagcagaagccagggaaagcccctaagctcctgatctatgctgcatccagtttgcaaagtggggtcccatcaaggttcagtggcagtggatctgggacagatttcactctcaccatcagcagtctgcaacctgaagattttgcaacttactactgtcaacagagttacagtgtccctccgctcactttcggcggagggacgaaggtggagatcaaag

SEQ ID NO: 953 - DNA, 325 bp, synthetic construct
  misc_feature 1..325: note = Description of sequence: Sequence Name: 71281-9
  source 1..325: mol_type = other DNA
tcctatgagctgacacagccaccctcggtgtcagtgtccccaggacaaacggccaggatcacctgctctggagatgcattgccaaaaaaatatgcttattggtaccagcagaagtcaggccaggcccctgtgctggtcatctatgaggacagcaaacgaccctccgggatccctgagagattctctggctccagctcagggacaatggccaccttgactatcagtggggcccagatggaggatgaagctgactactactgttactcaacagacagcactggtaatcatagggtgttcggcggggggaccaagctgaccgtcctag

SEQ ID NO: 954 - DNA, 337 bp, synthetic construct
  misc_feature 1..337: note = Description of sequence: Sequence Name: 71281-10
  source 1..337: mol_type = other DNA
gatgttgtgatgactcagtctccaccctccctgcccgccacccctggagagccggcctccatctcctgcaggtctagtcagagcctcctgcgtagtaatggaaagaaccatttgaattggtacctgcagaggccagggcagtctccacagctcctgatctacatgggttctattcgggcctccggggtccctgacaggttcagtggcagtggatcaggcacagattttacactgaaaatcagcacagtggaggctgaggatgttggggtttattactgcatgcaagctctacaaattccgtggacgttcggccaagggaccaaggtggaactcaaac

SEQ ID NO: 955 - DNA, 322 bp, synthetic construct
  misc_feature 1..322: note = Description of sequence: Sequence Name: 71281-11
  source 1..322: mol_type = other DNA
gaaattgtgttgacgcagtctccaggcaccctctctttgtctccaggggaaagagccaccctctcctgcagggccagtcagagtgttagtagctacttagcctggtatcagcagaaacctggccaggctcccaggctcctcatctatggtgcatccaacagggccactggcatcccagacaggttcagtggtagtggatctgggacagacttcactctcaccatcagcagactggagcctgaggattttgcagtgtattactgtcagcagtgtggtagttcacctcggacgttcggccaagggaccaaggtggaagtcaaac

SEQ ID NO: 956 - DNA, 325 bp, synthetic construct
  misc_feature 1..325: note = Description of sequence: Sequence Name: 71281-12
  source 1..325: mol_type = other DNA
tcttctgagttgactcaggaccctgctgtgtctgtggccttgggacagacagtcaggatcacatgccaaggagacagcctcagatattattatgcaagctggtaccagcagaagccaggacaggcccctgtacttgtcatctttggtaaaaacaaccggccctcagggatcccagaacgagtctctggctccagctcaggaaacacagcttccttgaccatcactggggctcaggcggaagatgaggctgactattactgtaattcccgggacagcagtggtaaccattgggtgttcggcggagggaccaagttgaccgtcctag

SEQ ID NO: 957 - DNA, 325 bp, synthetic construct
  misc_feature 1..325: note = Description of sequence: Sequence Name: 71281-13
  source 1..325: mol_type = other DNA
gacatccagatgacccagtctccatcctccctgtctgcatctgtgggagacagagtcaccatcacttgccaggcgagtcaggacatcaactactatttgaattggtatcaacaccggccagggaaagcccctcagctcctgatctacgatgcttccaaattggaaacaggggtcccatcaaggttcagtggaagtgcatctgggacagatttcactctcaccatcagcggcctgcagcctgaagatattgcaacatattactgtcaacagtatgataattcccctcggatcaccttcggccaagggacacgactggagattaagc

SEQ ID NO: 958 - DNA, 322 bp, synthetic construct
  misc_feature 1..322: note = Description of sequence: Sequence Name: 71281-14
  source 1..322: mol_type = other DNA
gaaattgtgttgacacagtctccagccaccctgtctttgtctccaggggaaagagccaccctctcctgcagggccactcagagtgttaggacccacttagcctggtaccaacagaaacctggccaggctcccaggctcctcatctatgatacatccaacagggccactggcatcccagccaggttcagtggcagtgggtctgggacagacttcactctcaccatcagcagcctagagcctgaagattttgcagtttattactgtcagcagcgtaacaagtggcccatcaccttcggccaagggacacgactggagattaaac

SEQ ID NO: 959 - DNA, 325 bp, synthetic construct
  misc_feature 1..325: note = Description of sequence: Sequence Name: 71281-15
  source 1..325: mol_type = other DNA
gacatccagttgacccagtctccatccttcctgtctgcatctgtgggagacagtatcagcatcacttgccgggccagtcaggccatcagcacttatttagcctggtatcaacaaaaaccagggaaagccccgaagctcctgatctatggtgcatccactttgcaaagtggggtcccaccaaggttcagcggcagtggatctgggacagatttcactctcacaatcagcagcctgcagcctgaagattttgcaacttattactgtcagcaacttgatcgttaccctccgttcaccttcggccaagggacacgactggagattaaac

SEQ ID NO: 960 - DNA, 328 bp, synthetic construct
  misc_feature 1..328: note = Description of sequence: Sequence Name: 71281-16
  source 1..328: mol_type = other DNA
gaaattgtgttgacgcagtctccaggcaccctgtctttgtctccaggggaaagagccaccctctcctgcagggccagtcagagtgttagcagcagctacttagcctggtaccagcagaaacctggccaggctcccaggctcctcatctatggtgcatccaccagggccactggcatcccagacaggttcagtggcagtgggtctgggacagacttcactctcaccatcagcagactggagcctgaagattttgccgtgtattactgtcagcactatggtagctcacctccgaggacgttcggccaagggaccaaggtggaaatcaaac

SEQ ID NO: 961 - DNA, 322 bp, synthetic construct
  misc_feature 1..322: note = Description of sequence: Sequence Name: 71281-17
  source 1..322: mol_type = other DNA
gaaattgtgttgacacagtctccagccaccctgtctttgtctccaggggaaagagccaccctctcctgcagggccagtcagagtgttagcagctacttagcctggttccaacagaaacctggccaggctcccaggctcctcatctatgatgcatccaacagggccactggcatcccagccaggttcagtggcagtgggtctgggacaggcttcactctcaccatcaacggcctagagcctgacgattttgcagtttattactgtcagcagcgtcggagctggccgtacacttttggccaggggaccaagctggagatcaaac

SEQ ID NO: 962 - DNA, 334 bp, synthetic construct
  misc_feature 1..334: note = Description of sequence: Sequence Name: 71281-18
  source 1..334: mol_type = other DNA
gatgttgtgatgactcagtttccactctccctgcccgtcacccttggacagccggcctccatctcctgcaggtctagtcaaagcctcgtatacggtgatggaaatactttcttgagttggtttcaccagaggccaggccattctccaaggcgcctaatttttagggtgtctaaccgggactctggggtcccagacaggttcagcggcagcgggtcaggcactgatttcacactgaaaatcagtagggtggaggctgaggatgctggcatttattactgcatgcagggtacaaattggtggacgttcggcccagggaccaaggtggaaatcaacc

SEQ ID NO: 963 - DNA, 331 bp, synthetic construct
  misc_feature 1..331: note = Description of sequence: Sequence Name: 71281-19
  source 1..331: mol_type = other DNA
cagtctgtgctgactcagccaccctcagcgtctgggacccccgggcagagggtcaccatctcttgttctggaagcaactccaacatcggaagtaattatatatactggtaccagcagctcccaggaacggcccccaaactcctcatctataggaatgatcagcggccctcaggggtccctgaccgattctctggctccaagtctggcacctcagcctccctggccatcagtgggctccggtccgaggatgaggctgattattactgtgcagcatgggatgacagcctgagtggtccggttttcggcggagggaccaagctgaccgtcctag

SEQ ID NO: 964 - DNA, 337 bp, synthetic construct
  misc_feature 1..337: note = Description of sequence: Sequence Name: 71281-20
  source 1..337: mol_type = other DNA
gacatcgtgatgacccagtctccagactccctggctgtgtctctgggcgagagggccaccatcaactgcaagtccagccagagtgttttaaacagctccaacaataagaactacttagcttggtaccagcagaaaccaggacagcctcctaagctcctcatttactggacatctacgcgggaatccggggtccctgaccgattcagtggcagcgggtctgggacagatttcactctcaccatcagcagcctgcaggctgaagatgtggcagtttattactgtcagcaatattatactactccggagttcggccaagggaccaaggtggaaataaaac

SEQ ID NO: 965 - DNA, 325 bp, synthetic construct
  misc_feature 1..325: note = Description of sequence: Sequence Name: 71281-21
  source 1..325: mol_type = other DNA
gacattgtgttgacacagtctccagccaccctgtccttgtctcctggggagagagccaccctctcctgcagggccagtcagagtgttagcagctacttagcctggtaccaacagaaacctggccaggctcccaggctcctcatctatgatgcatccaacagggccactggcatcccagccaggttcagtggcagtgggtctgggacagacttcactctcaccatcagcagcctagagcctgaagattttgcagtttattactgtcagcaacgtggcaactggcccccgatcaccttcggccgagggacacgactggagattaaac

SEQ ID NO: 966 - DNA, 334 bp, synthetic construct
  misc_feature 1..334: note = Description of sequence: Sequence Name: 71281-22
  source 1..334: mol_type = other DNA
cagtctgtgctgactcagccaccctcagcgtctgggacccccgggcagagggtcaccatctcttgttctggaagcagctccaacatcggaagtaatactgtaaactggtaccagcagctcccaggaacggcccccaaactcctcgtctatagtaatgatcttcggccctcaggggtccctgaccgattctctggctccaagtctggcacctcagcctccctggccatcagtgggctccagtctgaggatgaggctgattattactgtgcaacatgggatgacagcctgagtggtctttatgtcttcggaactgggaccaaggtcaccgtcctag

SEQ ID NO: 967 - DNA, 325 bp, synthetic construct
  misc_feature 1..325: note = Description of sequence: Sequence Name: 71281-23
  source 1..325: mol_type = other DNA
gaaattgtgttgacgcagtctccaggcaccctgtctttgtctccaggggaaagagccaccctctcctgcagggccagtcagagtgttagtaacaacaatttagcctggtaccagcagaaccctggccagtctcccaggctcctcatctatgatgcatccaggagggccactggcatcccagacaggttcagtggcagtgggtctgggacagacttcactctcaccatcagcagactggagcctgaagattttgcagtgtattactgtcagcactatgataactcagtctggacgttcggccaagggaccaaggtggaaatcaaac

SEQ ID NO: 968 - DNA, 340 bp, synthetic construct
  misc_feature 1..340: note = Description of sequence: Sequence Name: 71281-24
  source 1..340: mol_type = other DNA
gacatcgtgatgacccagtctccagactccctggctgtgtctctgggcgagagggccaccatcaactgcaagtccagccagagtgttttatacagctccaacaataagaactacttagcttggtaccagcagaaaccaggacagcctcctaagctgctcatttactgggcatctacccgggaatccggggtccctgaccgattcagtggcagcgggtctgggacagatttcactctcaccatcagcagcctgcaggctgaagatgtggcagtttattactgtcagcaatattatagtgctccgtggacgttcggccaagggaccaaggtggaaatcaaac

SEQ ID NO: 969 - DNA, 337 bp, synthetic construct
  misc_feature 1..337: note = Description of sequence: Sequence Name: 71281-25
  source 1..337: mol_type = other DNA
gatgttgtgatgactcagtctccactctccctgcccgtcactattggacagccggcctccatctcctgcaggtctagtcaaagcctcgtatacagtgatggaaacacctacttgaattggtttcagcagaggccaggccaatctccaaggcgcctaatttataagctttctaaccgggactctggggtcccagacagattcaccggcagtgggtcaggcactgatttcacactgaaaatcagcagggtggaggctgaggatgttggggtttattactgcatgcaaggtacgcagtggccgtggacttttggccaggggaccaagctggagatcaaac

SEQ ID NO: 970 - DNA, 331 bp, synthetic construct
  misc_feature 1..331: note = Description of sequence: Sequence Name: 71281-26
  source 1..331: mol_type = other DNA
cagtctgccctgactcagcctgcctccgtgtctgggtctcctggacagtcgatcaccatctcctgcactggaaccagcagtgacgttggtgcttataactatgtctcttggtgccagcagcacccaggcaaagcccccaaactcatcatttatgatgtcagtaagcggccctcaggggtttctgatcgcttctctggctccaagtctggcaacacggcctccctgaccatctctgggctccacactgaggacgaggctgattattactgctactcacttacgaccaccaccacttgggtgttcggcggagggaccaagctgaccgtcctag

SEQ ID NO: 971 - DNA, 331 bp, synthetic construct
  misc_feature 1..331: note = Description of sequence: Sequence Name: 71281-27
  source 1..331: mol_type = other DNA
cagtctgtgttgacgcagccgccctcagtgtctgcggccccaggacagaaggtcaccatctcctgctctggaagcagctccaacattggcaataattatgtgtcctggtaccagcagttcccaggaacagcccccaaagtcctcatctatgaaaatgataagcgaccctcagggattcctgaccgattctctggctccaggtctggcacgtcagccaccctgggcatcaccggactccagactggggacgaggccgattattactgcggaacatgggatagcagcctgagtactgaagtgttcggcggagggaccaagctgaccgtcctag

SEQ ID NO: 972 - DNA, 340 bp, synthetic construct
  misc_feature 1..340: note = Description of sequence: Sequence Name: 71281-28
  source 1..340: mol_type = other DNA
gacatcgtgatgacccagtctctagactccctggctgtgtctctgggcgagagggccaccatccactgcaagtccagccagagtgttttatacagctccaacaataagaactacttagcttggtaccagcataaaccaggacagcctcctaagctgctcatttactgggcatctacccgggaatccggggtccctgaccgattcagtggcagcgggtctgggacagatttcactctcaccatcagcagcctgcaggctgaagatgtggcagtttattactgtcagcaacattatagtactcctgttactttcggcggagggaccaaggtggagatcaaac

SEQ ID NO: 973 - DNA, 334 bp, synthetic construct
  misc_feature 1..334: note = Description of sequence: Sequence Name: 71281-29
  source 1..334: mol_type = other DNA
cagtctgtgctgacgcagccgccctcagtgtctggggccccagggcagagggtcaccatctcctgcactgggagcagctccaacatcggggcaggttatgatgtacactggtaccagcagtttccaggaacagcccccaaagtcctcatctatggtaatagcaatcggccctcaggggtccctgaccgattctctggctccaagtctggcacctcagcctccctggccatcactgggctccaggctgaggatgaggctgattattactgccagtcctatgacagcagcctgagtggttgggtgttcggcggagggaccaagctgaccgtcctag

SEQ ID NO: 974 - DNA, 322 bp, synthetic construct
  misc_feature 1..322: note = Description of sequence: Sequence Name: 71281-30
  source 1..322: mol_type = other DNA
gacatccggttgacccagtctccaacctccctgtctccatctgtcggagacagagtcatcatcacttgtcaggcgagtcagcacattggtacgtttttgagttggtatcagcaaaaaccaggacaagcccctaaactcctgatcaacgaagcatccaatttggagtcaggggtcccatcaaggttcagtggtagcggatctgggacatctttttctttcaccatcagcagcctgcagcctgaagatattgcaacatatttttgtcaacaatatgatgatttcccggtcactttcggcggagggaccaaggtgcagatcaaac

SEQ ID NO: 975 - DNA, 325 bp, synthetic construct
  misc_feature 1..325: note = Description of sequence: Sequence Name: 71281-31
  source 1..325: mol_type = other DNA
tcctatgtgctgactcaaccaccctcggtgtcagtggccccagcacagacggccaggattacctgtgggggaaacaatattgaaagtaaaagtgtgcactggtaccagcagaagccaggccaggcccctgtgctggtcgtctatgaaaatagcgaccggccctcagggatccctgagcgattctctggctccaactcggggaacatggccaccctgaccatcagcagggtcgaagccggggatgaggccgactattactgtcaggtgtgggagagtagtagtgatcatgtgatattcggcggagggaccaagctgaccgtcctag

SEQ ID NO: 976 - DNA, 328 bp, synthetic construct
  misc_feature 1..328: note = Description of sequence: Sequence Name: 71281-32
  source 1..328: mol_type = other DNA
cagtctgccctgactcagcctgcctccgtgtctgggtctcctggacagtcgatcaccatctcctgcactgcaaccagcagtgacgttggtgcttataactatgtctcctggtaccaacaccacccaggcaaagcccccaaactcatgatttatgaggtcactaatcggccctcaggggtttctaatcgcttctctggctccaagtctggcaacacggcctccctgaccatctctgggctccaggctgaggacgaggctgattattactgcagctcatatacaaccagcagcgtggttttcggcggagggaccaagctgaccgtcctag

SEQ ID NO: 977 - DNA, 316 bp, synthetic construct
  misc_feature 1..316: note = Description of sequence: Sequence Name: 71281-33
  source 1..316: mol_type = other DNA
gacacccagatgacccagtctccttccatcctgtctgcatctgtaggagacagagtcaccatcacttgccgggccagtcagggtattagtacgttcttggcctggtatcagcagaaaccagggaaagcccctaagctcctgatctatgatgcctccagtttggaaagtggggtcccatcaaggttcagcggcagtggatctgggacagaattcactctcaccatcaccaccctgcagcctgatgatcttgcaacttattactgccaacagtataatacgtacacttttggccaggggaccaagctggagatcaaac

SEQ ID NO: 978 - DNA, 322 bp, synthetic construct
  misc_feature 1..322: note = Description of sequence: Sequence Name: 71281-34
  source 1..322: mol_type = other DNA
gacatccagttgacccagtctccatccttcctgtctgcatctgtaggagacagagtcaccatcgcttgccgggccagtcagggcattgctggttatttagcctggtatcagcaaaagccagggaaagcccctgccctcctgatctatgctgcatccactttgcaaagtggggtcccatcaaggttcggcggcagtggatctgggacagaattcactctcacaatcagcaacctgcagcctgaagattttggaactttttactgtcaacaggttaatagttatcctcggacgttcggccaagggaccaaggtggaaatcaaac

SEQ ID NO: 979 - DNA, 322 bp, synthetic construct
  misc_feature 1..322: note = Description of sequence: Sequence Name: 71281-35
  source 1..322: mol_type = other DNA
gacatccagatgacccagtctccatcctccctgtctgcatctgtaggagacagagtcaccatcacttgccaggcgagtcaggacattagcaagtatttaaattggtatcagcagagaccagggaaagcccctaagctcctgatctacgatgcatccaatttgggaacaggggtcccatcaaggttcagtggaagtggatctgggacagattttactttcaccatcagcagcctgcagcctgaagatattgcaacatattactgtcaacagtatgataatttacctcgcacttttggccaggggaccaagctggagatcaaac

SEQ ID NO: 980 - DNA, 325 bp, synthetic construct
  misc_feature 1..325: note = Description of sequence: Sequence Name: 71281-36
  source 1..325: mol_type = other DNA
gaggttgtgttgacgcagtctccaggcaccctgtctttgtctccaggggaaagtgccaccctctcctgcagggccagtcagagtgttaggagcgactactttgcctggtaccagcagaaacctggccaggctcccaggctcctcatctatgctgcatcccggagggccactgccatcccagacaggttcagtggcagtgggtctgggacagacttcactctcaacatcagcagactggagcctgaagatttcgcagtgtattcctgtcagcagtatagtaggtcaccgtacagttttggccaggggaccaagctggagatcagac

SEQ ID NO: 981 - DNA, 322 bp, synthetic construct
  misc_feature 1..322: note = Description of sequence: Sequence Name: 71281-37
  source 1..322: mol_type = other DNA
gacatccagatgacccagtctccatcctccctgtctgcatctgtaggagacagagtcaccatcacttgccaggcgagtcaggacattagaaactttttaaattggtatcagcagaaaccagggaaagcccctaaactcctgatctacgatgcatccaatttggaaacaggggtcccatcaaggttcaggggaactggatctgggacagattttactttcaccatcagcagcctgcagcctgaagatattgcaacatattactgtcaacagtatgataatctcccaatgaccttcggccaagggacacgactggagattagac

SEQ ID NO: 982 - DNA, 331 bp, synthetic construct
  misc_feature 1..331: note = Description of sequence: Sequence Name: 71281-38
  source 1..331: mol_type = other DNA
cagtctgtgctgactcaggcaccctcagcgtctgggacccccgggcagagggtcaccatctcctgttctggaagcagctccaacatcggaagtaatactgtcagctggtaccagcagctcccaggaacggcccccaaagtcctcatttatagtaataagcagcggccctcaggggtccctgaccgattctctggctccaagtctgacacctcagcctccctggccatcagtgggctccagtctgaggatgaggctgattattactgtgcagcatgggatgacagcctgaatggtcgggtgttcggcggagggaccaggctgaccgtcctag

SEQ ID NO: 983 - DNA, 322 bp, synthetic construct
  misc_feature 1..322: note = Description of sequence: Sequence Name: 71281-39
  source 1..322: mol_type = other DNA
gacatccaaatgacccagtctccatcctccctgtctgcatctgtaggagacagagtcaccatcacttgccgggcaagtcaagacattagagatgatttagcctggtatcagcagaaaccagggagagcccctaagcgcctgatctatgctgcatccaatttgcaaggtggggtcccatcaaggttcagcggcagtggatctgggacagaattcactctcacaatcagcaggctgcagcctgaagattttgcaagttattactgtctacagcataatactttcccgtacagttttggccaggggaccaagctggagatcaagc

SEQ ID NO: 984 - DNA, 334 bp, synthetic construct
  misc_feature 1..334: note = Description of sequence: Sequence Name: 71282-1
  source 1..334: mol_type = other DNA
cagtctgtgctgacgcagccgccctcagtgtctggggccccagggcagagggtcaccatctcctgcactgggagcagctccaacatcggggcaggttatgatgtacactggtaccagcagcttccaggaacagcccccaaactcctcatctatggtaacatcaatcggccctcaggggtccctgaccgattctctggctccaagtctggcacctcagcctccctggccatcactgggctccaggctgaggatgaggctgattattactgccagtcctacgacagcagcttgagtggttcggtattcggcggagggaccaaactgaccgtcctag

SEQ ID NO: 985 - DNA, 322 bp, synthetic construct
  misc_feature 1..322: note = Description of sequence: Sequence Name: 71282-2
  source 1..322: mol_type = other DNA
gaaattgtgttgacacagtctccagccaccctgtctttgtctccaggggaaagagccaccctctcctgcagggccagtcagagtgttagcagctacttagcctggtaccaacagaaacctggccaggctcccaggctcctcatccatgatgcatccaacagggccactggcaccccagccaggttcagtggcagtgggtctgggacagacttcactctcaccgtcagcagcctagagcctgaggattttgcagtttattactgtcagcagcgtaaggactggcctctaacttttggccaggggaccaggttagagatcaaac

SEQ ID NO: 986 - DNA, 334 bp, synthetic construct
  misc_feature 1..334: note = Description of sequence: Sequence Name: 71282-3
  source 1..334: mol_type = other DNA
cagtctgtgctgacgcagccgccctcagtgtctggggccccagggcagagtgtcaccatctcctgcactgggagcaactccaacatcggggcaggttatgatgtgaattggtaccagcagattcctggaacagcccccaaactcctcatctatggtcacatcaatcggccctcaggggtccctgaccgattctctggctccaagtctggcacctcagcctccctggccatcactgggctccaggctgaggatgaggctgattattactgccagtcctatgacagcagcctgagtgggtcggtgttcggcggggggaccaagctgaccgtcctag

SEQ ID NO: 987 - DNA, 322 bp, synthetic construct
  misc_feature 1..322: note = Description of sequence: Sequence Name: 71282-4
  source 1..322: mol_type = other DNA
gacatccagatgacccagtctccatctgccatgtctgcatctgtaggagacagagtcaccatcacttgtcgggcgagtcaggacattaacatttatttagcctggtttcagcagaaaccagggaaagtccctaagcgcctgatctatgctgcatccaatttgcaaagtggggtcccatcaaggttcagcggcagggggtctggggcagaattcactctcacaatcagcagcctgcagcctgaagattttgcaacttattactgtctacaacataataattacccttggacgttcggccaagggaccaaggtggcattcaaac

SEQ ID NO: 988 - DNA, 325 bp, synthetic construct
  misc_feature 1..325: note = Description of sequence: Sequence Name: 71282-5
  source 1..325: mol_type = other DNA
tcctatgagctgacacagccaccgtcggtgtcagtgtccccaggacagacggccaggatcacctgctctggagatgcattgccaatgcaatatggttattggtaccagcagaagccaggccaggcccctgtgttggtgataaagaaagacagagagaggccctcagggatccctgagcgattctctggctccggctcagggacaacactcacgttgaccatcagtagagtccaggcagaagacgaggctgactatttctgtcagtcagcagacagaagtggaaaatatgtagttttcggcggagggaccaaactgaccgtcctag

SEQ ID NO: 989 - DNA, 331 bp, synthetic construct
  misc_feature 1..331: note = Description of sequence: Sequence Name: 71282-6
  source 1..331: mol_type = other DNA
cagtctgtgctgactcagccaccctcggtgtctgaagcccccaggcagagggtcaccatctcctgttctggaagcagctccaacatcggaaataatgctgtaaactggtaccagcagctcccaggaaaggctcccaaactcctcatctattataatgatctgctgccctcaggggtctctgaccgattctctggctccaagtctggcacctcagcctccctggccatcagtgggctccagtctgaggatgaggctgattattactgtgcaacatgggatgacagcctgaatgcctgggtgttcggcggagggaccaagctgaccgtcctag

SEQ ID NO: 990 - DNA, 322 bp, synthetic construct
  misc_feature 1..322: note = Description of sequence: Sequence Name: 71282-7
  source 1..322: mol_type = other DNA
gaaattgtgttgacgcagtctccaggcaccctgtctttgtctccaggggaaagagccaccctctcctgcagggccagtcagagtgttagcagcagctacttagcctggtaccagcagaaacctggccaggctcccaggctcctcatctatggtgcatccagcagggccactggcatcccagacaggttcagtggccgtgggtctgggacagacttcactctcaccgtcagcagactggagcctgaagattttgcagtgtattactgtcagcactatggtagctcattcactttcggccctgggaccaaagtggagatcaaag

SEQ ID NO: 991 - DNA, 325 bp, synthetic construct
  misc_feature 1..325: note = Description of sequence: Sequence Name: 71282-8
  source 1..325: mol_type = other DNA
gacatccagatgacccagtctccatcctccctgtctgcatctgtaggagacagagtcaccatcacttgccgggcaagtcagagcattaacacctatttaaattggtatcagcagaaaccagggaaagcccctaaggtcctgatctatgctgcatccagtttgcaaagtggggtcccatcaaggttcagtggaagtggatctgggacagatttcactctcaccatcagcagtctgcaacctgaagattttgcaacttactactgtcaacagagttacagtacccccatgtacacttttggccaggggaccaagctggagatcaaac

SEQ ID NO: 992 - DNA, 325 bp, synthetic construct
  misc_feature 1..325: note = Description of sequence: Sequence Name: 71282-9
  source 1..325: mol_type = other DNA
gaaattgtgttgacgcagtctccaggcaccctgtctttgtctccaggggaaagagtcaccctctcctgcagggccagtcaatattttagcagcagtcacttagcctggtaccagcatagacctggccaggctcccaggctcctcatgtatggtgcatcctacagggccactggcatcccagacaggttcagtggcagtgtgtctgggacagacttcactctcaccatcagcagactggagcctgaagatttagcagtgtattactgtcagtactatggtaactcacctaggacttttggccaggggaccaagctggagatcaaac

SEQ ID NO: 993 - DNA, 328 bp, synthetic construct
  misc_feature 1..328: note = Description of sequence: Sequence Name: 71282-10
  source 1..328: mol_type = other DNA
gaaattgtgttgacgcagtctccaggcaccctgtctttgtctccaggggaaagagtcaccctctcctgcagggccagtcagggtgttagcagcaactacttagcctggtaccagcagaaacctggccaggctcccaggctcctcatctatggtgcatccagcagggccactggcgtcccagacaggttcagtggcagtgggtctgggacagacttcactctcaccatcagcggactggagcctgaggattttgcagtgtattactgtcagcagtatggtagctcacccatgtacacttttggccaggggaccaagctggagatcaaac

SEQ ID NO: 994 - DNA, 334 bp, synthetic construct
  misc_feature 1..334: note = Description of sequence: Sequence Name: 71282-11
  source 1..334: mol_type = other DNA
cagcttgtgctgactcaatcgccctctgcctctgcctccctgggagcctcggtcaacctcacctgcactctgagcagtgggcacagcagctacgccatcgcatggcatcagcagcagccagagaagggccctcggttcttgatgaggcttaacagtgatggcagccacaccaagggggacgggatccctgatcgcttctcaggctccagctctggggctgcgcgctacctcaccatctccagcctccagtctgaggatgaggctgactattactgtcagacctggggcactggcattcgagtgttcggcggagggaccaagctgaccgtcctag

SEQ ID NO: 995 - DNA, 322 bp, synthetic construct
  misc_feature 1..322: note = Description of sequence: Sequence Name: 71282-12
  source 1..322: mol_type = other DNA
gacatccagatgacccagtctccatcctccctgtctgcatctgtaggagacagagtcaccatcacttgccgggcaagtcagagcattagcagctatttaaattggtatcagcagaaaccagggaaagcccctaacctcctgatctacgctgcatccagtttgcaaagtggggtcccatcaaggttcagtggcagtggatctgggacagatttcactctcaccatcagcagtctgcaacctgaagattttgcaacttactactgtcaacaggattacagtacccctcaaacgttcggccaagggaccaaggtggaaatcaaac

SEQ ID NO: 996 - DNA, 322 bp, synthetic construct
  misc_feature 1..322: note = Description of sequence: Sequence Name: 71282-13
  source 1..322: mol_type = other DNA
tcctatgtgctgactcagccaccctcagtgtcagtggccccaggaaagacggccacgattacctgtgggggtgacaacattggaagtaaaagcgtacactggtaccaacagaagccaggccaggcccctgtgctggtcattaatgatgatggcgaccggccctcagggatccctgagcgattttctggctccaagtctgcgaacacggccaccctgaccatcagcagggtcgaagccggggatgaggccgactaccactgtcaggtgtgggatcccaagactgattatgtcttcgcaggtgggacccaggtcaccgtcctag

SEQ ID NO: 997 - DNA, 331 bp, synthetic construct
  misc_feature 1..331: note = Description of sequence: Sequence Name: 71282-14
  source 1..331: mol_type = other DNA
cagtctgtgctgactcagccaccctcagcgtctgggacccccgggcagagggtcaccatctcttgttctggaagcagctccaacatcgaaagtaattatgtatactggtaccagcagctcccaggaatggcccccaaactcctcatctatagcaatgctcagcggccctcaggggtccctgaccggttctctggctccaagtctggcacctcagcctccctggccatcagtgggctccggtccgaggatgaggctgattattactgtgcagcatgggatgacagcctgagtggttatgtcttcggaactgggaccaaggtcaccgtcctag

SEQ ID NO: 998 - DNA, 319 bp, synthetic construct
  misc_feature 1..319: note = Description of sequence: Sequence Name: 71282-15
  source 1..319: mol_type = other DNA
gacgtccagatgacccagtctccatcctccctgtctgcatttgtaggtgacagagtcaccatcacttgccgggcaagtcagagcattaatgcctatttgaattggtatcagcaaaaaccaggaaaagcccctaaactcctgatctatgctgcatccagtttgcaaagtggggtcacgtcaagattcagtggcagtggatttgggacagaattcactctcgctatcgacagtctgcaacctgaggattttgcaacttactactgtcaacagagttacagtccccccactttcggcggagggaccagggtggagatcagac

SEQ ID NO: 999 - DNA, 319 bp, synthetic construct
  misc_feature 1..319: note = Description of sequence: Sequence Name: 71282-16
  source 1..319: mol_type = other DNA
tcctatgaactgactcagccaccctcagtgtccgtgtccccaggacagacagcttccatcacctgttctggagataaattggacaataaatatacttgttggtatcaacagaaggcaggccagccccctgtgttgctcatttatcagggtactgagcggccctcagggatctctgaacgattctctgtctccgactctgggaacacagtcactctgaccatcagcgggacccagtctatggatgaggcggactattactgtcagacgtgggacttcactcatgtggttttcggcggggggaccaagctgaccgtcctaa

SEQ ID NO: 1000 - DNA, 322 bp, synthetic construct
  misc_feature 1..322: note = Description of sequence: Sequence Name: 71282-17
  source 1..322: mol_type = other DNA
gaaattgtgttgacgcagtctccagacaccctgtctttgcctccaggtgaaagagccaccctctcctgcagggccagtcaggctgttagtagaagtaaggtggcctggtatcagcacaaacctggccaggctcccaggctcctcatctatgatgcatccagcagggccactgacatcccagacagattcagtggcagtgggtctgggacagacttcactctcaccatcagcagactggaccctgaagacttcgcagtgtattactgtcaggaatatgctagcgggtacacttttggccaggggaccaagctggaagtcaaac

SEQ ID NO: 1001 - DNA, 337 bp, synthetic construct
  misc_feature 1..337: note = Description of sequence: Sequence Name: 71282-18
  source 1..337: mol_type = other DNA
gattttttgatgacccagactccactctctctgtccgtcacccctggacagtcggcctccatctcctgcaagtctagtcagagcctcctgcatagtgatggaaagacctatttgtattggtacctgcagaagccaggccagtctccacagctcctgatctatgaagtttccaaccggttctctggagtgccagataggttcagtggcagcgggtcagggacagatttcacactgaaaatcagccgggtggaggctgaggatgttggggtttattactgcatgcaaaatatacagcttctgtacacttttggccaggggaccaagctggagatcaaac

SEQ ID NO: 1002 - DNA, 319 bp, synthetic construct
  misc_feature 1..319: note = Description of sequence: Sequence Name: 71282-19
  source 1..319: mol_type = other DNA
gacatccagatgacccagtctccttccaccctgtctgcatctgtgggagacagagtcaccatcacttgccggcccagtcagagtattagtcagtggttggcctggtaccagcagaaaccagggaaagccccaaagctcctaatctttaaggcatctactttagaaagtggggtcccgtcaaggttcagcggcagtggctctgggacagaattcactctcactatcagcagtctgcagcctgatgattttgcaacttattactgccaacagtatataagttttccgacttttggccaggggaccaagctggagatcagac

SEQ ID NO: 1003 - DNA, 319 bp, synthetic construct
  misc_feature 1..319: note = Description of sequence: Sequence Name: Unnamed sequence
  source 1..319: mol_type = other DNA
tcctatgagctgacacagccaccctcggtgtcagtgtccccaggacagacggccaggatcacctgctctggagatgcatggccaaagcaatatgcttattggtaccagcagaagccaggccagtcccctgtgttggtgatatataaagacagtgagaggccctcagggatccctgagcgattctctggctccagctcagggacaacagtcacgttgaccatcagtggagtccaggcagaagacgaggctgactattactgtcaatcagcagacagcagaggtgtggtattcggcggagggaccaggctgaccgtcctag

SEQ ID NO: 1004 - protein, 110 aa, synthetic construct
  REGION 1..110: note = Description of sequence: Sequence Name: 71281-1
QSVLTQPPSVSAAPGQKVTISCSGSSSNIGNNYVSWYQQLPGTAPKLLIYENNKRPSGIPDRFSGSKSGTSATLGITGLQTGDEADFYCGTWDSSLSAFVFGTGTKVTAL

SEQ ID NO: 1005 - protein, 113 aa, synthetic construct
  REGION 1..113: note = Description of sequence: Sequence Name: 71281-2
DIVMTQSPDSLAVSLGEGATVNCKSSQSVFYSSTNNSYLAWYQQKPGQPPKLLIYWASTRESGVPDRFSGSGSGTDFTLTISSLQAEDVAVYYCQQYYNTPLTFGGGTRVEIK

SEQ ID NO: 1006 - protein, 106 aa, synthetic construct
  REGION 1..106: note = Description of sequence: Sequence Name: 71281-3
SYELTQPPSVSVSPGQTASITCSGDKLGDKFVCWYQQKPGLSPLLVIYQDNKRPSGIPERFSGSNSGNTATLTISGTQAMDEADYFCQAWASSTAIFGGGTKLTVL

SEQ ID NO: 1007 - protein, 108 aa, synthetic construct
  REGION 1..108: note = Description of sequence: Sequence Name: 71281-4
EIVMTQSPATLSVSPGERATLSCRASQSVSSNLAWYQQKPGQAPRLLIYGASSRATGIPARFSGSGSGTEFTLTISSLQSEDFAVYYCQQYNNWPSYTFGQGTKLEIK

SEQ ID NO: 1008 - protein, 110 aa, synthetic construct
  REGION 1..110: note = Description of sequence: Sequence Name: 71281-5
QSVLTQPPSVSAAPGQKVTISCSGSSSNIEKNYVSWYQLLPGRAPKLLIHQNSKRPSGIPDRFSGSKSGTSATLGITGLQTGDEADYYCGTWDSSLRAVVFGGGTKLTVL

SEQ ID NO: 1009 - protein, 107 aa, synthetic construct
  REGION 1..107: note = Description of sequence: Sequence Name: 71281-6
DIQMTQSPSSLSASVGDRVTITCQASQDINNYLNWYQQKPGKAPKLLIYDASNLDTGVPSRFSGSGSGTDFTFTISSLQPEDVATYYCQQYENLIFTFGPGTKVDVK

SEQ ID NO: 1010 - protein, 108 aa, synthetic construct
  REGION 1..108: note = Description of sequence: Sequence Name: 71281-7
SHELTQPPSVSVSPRQTARITCSGDNLPKQYTYWYQQKPGQAPLLVIYKDSERPSGIPERFSGSSSGTTVTLTISGVQAEDEADYYCQSADTGGTFVVFGGGTKLSVL

SEQ ID NO: 1011 - protein, 108 aa, synthetic construct
  REGION 1..108: note = Description of sequence: Sequence Name: 71281-8
DIQMTQSPSSLSASVGDRVTITCRASQSIARFLNWYQQKPGKAPKLLIYAASSLQSGVPSRFSGSGSGTDFTLTISSLQPEDFATYYCQQSYSVPPLTFGGGTKVEIK

SEQ ID NO: 1012 - protein, 108 aa, synthetic construct
  REGION 1..108: note = Description of sequence: Sequence Name: 71281-9
SYELTQPPSVSVSPGQTARITCSGDALPKKYAYWYQQKSGQAPVLVIYEDSKRPSGIPERFSGSSSGTMATLTISGAQMEDEADYYCYSTDSTGNHRVFGGGTKLTVL

SEQ ID NO: 1013 - protein, 112 aa, synthetic construct
  REGION 1..112: note = Description of sequence: Sequence Name: 71281-10
DVVMTQSPPSLPATPGEPASISCRSSQSLLRSNGKNHLNWYLQRPGQSPQLLIYMGSIRASGVPDRFSGSGSGTDFTLKISTVEAEDVGVYYCMQALQIPWTFGQGTKVELK

SEQ ID NO: 1014 - protein, 107 aa, synthetic construct
  REGION 1..107: note = Description of sequence: Sequence Name: 71281-11
EIVLTQSPGTLSLSPGERATLSCRASQSVSSYLAWYQQKPGQAPRLLIYGASNRATGIPDRFSGSGSGTDFTLTISRLEPEDFAVYYCQQCGSSPRTFGQGTKVEVK

SEQ ID NO: 1015 - protein, 108 aa, synthetic construct
  REGION 1..108: note = Description of sequence: Sequence Name: 71281-12
SSELTQDPAVSVALGQTVRITCQGDSLRYYYASWYQQKPGQAPVLVIFGKNNRPSGIPERVSGSSSGNTASLTITGAQAEDEADYYCNSRDSSGNHWVFGGGTKLTVL

SEQ ID NO: 1016 - protein, 108 aa, synthetic construct
  REGION 1..108: note = Description of sequence: Sequence Name: 71281-13
DIQMTQSPSSLSASVGDRVTITCQASQDINYYLNWYQHRPGKAPQLLIYDASKLETGVPSRFSGSASGTDFTLTISGLQPEDIATYYCQQYDNSPRITFGQGTRLEIK

SEQ ID NO: 1017 - protein, 107 aa, synthetic construct
  REGION 1..107: note = Description of sequence: Sequence Name: 71281-14
EIVLTQSPATLSLSPGERATLSCRATQSVRTHLAWYQQKPGQAPRLLIYDTSNRATGIPARFSGSGSGTDFTLTISSLEPEDFAVYYCQQRNKWPITFGQGTRLEIK

SEQ ID NO: 1018 - protein, 108 aa, synthetic construct
  REGION 1..108: note = Description of sequence: Sequence Name: 71281-15
DIQLTQSPSFLSASVGDSISITCRASQAISTYLAWYQQKPGKAPKLLIYGASTLQSGVPPRFSGSGSGTDFTLTISSLQPEDFATYYCQQLDRYPPFTFGQGTRLEIK

SEQ ID NO: 1019 - protein, 109 aa, synthetic construct
  REGION 1..109: note = Description of sequence: Sequence Name: 71281-16
EIVLTQSPGTLSLSPGERATLSCRASQSVSSSYLAWYQQKPGQAPRLLIYGASTRATGIPDRFSGSGSGTDFTLTISRLEPEDFAVYYCQHYGSSPPRTFGQGTKVEIK

SEQ ID NO: 1020 - protein, 107 aa, synthetic construct
  REGION 1..107: note = Description of sequence: Sequence Name: 71281-17
EIVLTQSPATLSLSPGERATLSCRASQSVSSYLAWFQQKPGQAPRLLIYDASNRATGIPARFSGSGSGTGFTLTINGLEPDDFAVYYCQQRRSWPYTFGQGTKLEIK

SEQ ID NO: 1021 - protein, 111 aa, synthetic construct
  REGION 1..111: note = Description of sequence: Sequence Name: 71281-18
DVVMTQFPLSLPVTLGQPASISCRSSQSLVYGDGNTFLSWFHQRPGHSPRRLIFRVSNRDSGVPDRFSGSGSGTDFTLKISRVEAEDAGIYYCMQGTNWWTFGPGTKVEIN

SEQ ID NO: 1022 - protein, 110 aa, synthetic construct
  REGION 1..110: note = Description of sequence: Sequence Name: 71281-19
QSVLTQPPSASGTPGQRVTISCSGSNSNIGSNYIYWYQQLPGTAPKLLIYRNDQRPSGVPDRFSGSKSGTSASLAISGLRSEDEADYYCAAWDDSLSGPVFGGGTKLTVL

SEQ ID NO: 1023 - protein, 112 aa, synthetic construct
  REGION 1..112: note = Description of sequence: Sequence Name: 71281-20
DIVMTQSPDSLAVSLGERATINCKSSQSVLNSSNNKNYLAWYQQKPGQPPKLLIYWTSTRESGVPDRFSGSGSGTDFTLTISSLQAEDVAVYYCQQYYTTPEFGQGTKVEIK

SEQ ID NO: 1024 - protein, 108 aa, synthetic construct
  REGION 1..108: note = Description of sequence: Sequence Name: 71281-21
DIVLTQSPATLSLSPGERATLSCRASQSVSSYLAWYQQKPGQAPRLLIYDASNRATGIPARFSGSGSGTDFTLTISSLEPEDFAVYYCQQRGNWPPITFGRGTRLEIK

SEQ ID NO: 1025 - protein, 111 aa, synthetic construct
  REGION 1..111: note = Description of sequence: Sequence Name: 71281-22
QSVLTQPPSASGTPGQRVTISCSGSSSNIGSNTVNWYQQLPGTAPKLLVYSNDLRPSGVPDRFSGSKSGTSASLAISGLQSEDEADYYCATWDDSLSGLYVFGTGTKVTVL

SEQ ID NO: 1026 - protein, 108 aa, synthetic construct
  REGION 1..108: note = Description of sequence: Sequence Name: 71281-23
EIVLTQSPGTLSLSPGERATLSCRASQSVSNNNLAWYQQNPGQSPRLLIYDASRRATGIPDRFSGSGSGTDFTLTISRLEPEDFAVYYCQHYDNSVWTFGQGTKVEIK

SEQ ID NO: 1027 - protein, 113 aa, synthetic construct
  REGION 1..113: note = Description of sequence: Sequence Name: 71281-24
DIVMTQSPDSLAVSLGERATINCKSSQSVLYSSNNKNYLAWYQQKPGQPPKLLIYWASTRESGVPDRFSGSGSGTDFTLTISSLQAEDVAVYYCQQYYSAPWTFGQGTKVEIK

SEQ ID NO: 1028 - protein, 112 aa, synthetic construct
  REGION 1..112: note = Description of sequence: Sequence Name: 71281-25
DVVMTQSPLSLPVTIGQPASISCRSSQSLVYSDGNTYLNWFQQRPGQSPRRLIYKLSNRDSGVPDRFTGSGSGTDFTLKISRVEAEDVGVYYCMQGTQWPWTFGQGTKLEIK

SEQ ID NO: 1029 - protein, 110 aa, synthetic construct
  REGION 1..110: note = Description of sequence: Sequence Name: 71281-26
QSALTQPASVSGSPGQSITISCTGTSSDVGAYNYVSWCQQHPGKAPKLIIYDVSKRPSGVSDRFSGSKSGNTASLTISGLHTEDEADYYCYSLTTTTTWVFGGGTKLTVL

SEQ ID NO: 1030 - protein, 110 aa, synthetic construct
  REGION 1..110: note = Description of sequence: Sequence Name: 71281-27
QSVLTQPPSVSAAPGQKVTISCSGSSSNIGNNYVSWYQQFPGTAPKVLIYENDKRPSGIPDRFSGSRSGTSATLGITGLQTGDEADYYCGTWDSSLSTEVFGGGTKLTVL

SEQ ID NO: 1031 - protein, 113 aa, synthetic construct
  REGION 1..113: note = Description of sequence: Sequence Name: 71281-28
DIVMTQSLDSLAVSLGERATIHCKSSQSVLYSSNNKNYLAWYQHKPGQPPKLLIYWASTRESGVPDRFSGSGSGTDFTLTISSLQAEDVAVYYCQQHYSTPVTFGGGTKVEIK

SEQ ID NO: 1032 - protein, 111 aa, synthetic construct
  REGION 1..111: note = Description of sequence: Sequence Name: 71281-29
QSVLTQPPSVSGAPGQRVTISCTGSSSNIGAGYDVHWYQQFPGTAPKVLIYGNSNRPSGVPDRFSGSKSGTSASLAITGLQAEDEADYYCQSYDSSLSGWVFGGGTKLTVL

SEQ ID NO: 1033 - protein, 107 aa, synthetic construct
  REGION 1..107: note = Description of sequence: Sequence Name: 71281-30
DIRLTQSPTSLSPSVGDRVIITCQASQHIGTFLSWYQQKPGQAPKLLINEASNLESGVPSRFSGSGSGTSFSFTISSLQPEDIATYFCQQYDDFPVTFGGGTKVQIK

SEQ ID NO: 1034 - protein, 108 aa, synthetic construct
  REGION 1..108: note = Description of sequence: Sequence Name: 71281-31
SYVLTQPPSVSVAPAQTARITCGGNNIESKSVHWYQQKPGQAPVLVVYENSDRPSGIPERFSGSNSGNMATLTISRVEAGDEADYYCQVWESSSDHVIFGGGTKLTVL

SEQ ID NO: 1035 - protein, 109 aa, synthetic construct
  REGION 1..109: note = Description of sequence: Sequence Name: 71281-32
QSALTQPASVSGSPGQSITISCTATSSDVGAYNYVSWYQHHPGKAPKLMIYEVTNRPSGVSNRFSGSKSGNTASLTISGLQAEDEADYYCSSYTTSSVVFGGGTKLTVL

SEQ ID NO: 1036 - protein, 105 aa, synthetic construct
  REGION 1..105: note = Description of sequence: Sequence Name: 71281-33
DTQMTQSPSILSASVGDRVTITCRASQGISTFLAWYQQKPGKAPKLLIYDASSLESGVPSRFSGSGSGTEFTLTITTLQPDDLATYYCQQYNTYTFGQGTKLEIK

SEQ ID NO: 1037 - protein, 107 aa, synthetic construct
  REGION 1..107: note = Description of sequence: Sequence Name: 71281-34
DIQLTQSPSFLSASVGDRVTIACRASQGIAGYLAWYQQKPGKAPALLIYAASTLQSGVPSRFGGSGSGTEFTLTISNLQPEDFGTFYCQQVNSYPRTFGQGTKVEIK

SEQ ID NO: 1038 - protein, 107 aa, synthetic construct
  REGION 1..107: note = Description of sequence: Sequence Name: 71281-35
DIQMTQSPSSLSASVGDRVTITCQASQDISKYLNWYQQRPGKAPKLLIYDASNLGTGVPSRFSGSGSGTDFTFTISSLQPEDIATYYCQQYDNLPRTFGQGTKLEIK

SEQ ID NO: 1039 - protein, 108 aa, synthetic construct
  REGION 1..108: note = Description of sequence: Sequence Name: 71281-36
EVVLTQSPGTLSLSPGESATLSCRASQSVRSDYFAWYQQKPGQAPRLLIYAASRRATAIPDRFSGSGSGTDFTLNISRLEPEDFAVYSCQQYSRSPYSFGQGTKLEIR

SEQ ID NO: 1040 - protein, 107 aa, synthetic construct
  REGION 1..107: note = Description of sequence: Sequence Name: 71281-37
DIQMTQSPSSLSASVGDRVTITCQASQDIRNFLNWYQQKPGKAPKLLIYDASNLETGVPSRFRGTGSGTDFTFTISSLQPEDIATYYCQQYDNLPMTFGQGTRLEIR

SEQ ID NO: 1041 - protein, 110 aa, synthetic construct
  REGION 1..110: note = Description of sequence: Sequence Name: 71281-38
QSVLTQAPSASGTPGQRVTISCSGSSSNIGSNTVSWYQQLPGTAPKVLIYSNKQRPSGVPDRFSGSKSDTSASLAISGLQSEDEADYYCAAWDDSLNGRVFGGGTRLTVL

SEQ ID NO: 1042 - protein, 107 aa, synthetic construct
  REGION 1..107: note = Description of sequence: Sequence Name: 71281-39
DIQMTQSPSSLSASVGDRVTITCRASQDIRDDLAWYQQKPGRAPKRLIYAASNLQGGVPSRFSGSGSGTEFTLTISRLQPEDFASYYCLQHNTFPYSFGQGTKLEIK

SEQ ID NO: 1043 - protein, 111 aa, synthetic construct
  REGION 1..111: note = Description of sequence: Sequence Name: 71282-1
QSVLTQPPSVSGAPGQRVTISCTGSSSNIGAGYDVHWYQQLPGTAPKLLIYGNINRPSGVPDRFSGSKSGTSASLAITGLQAEDEADYYCQSYDSSLSGSVFGGGTKLTVL

SEQ ID NO: 1044 - protein, 107 aa, synthetic construct
  REGION 1..107: note = Description of sequence: Sequence Name: 71282-2
EIVLTQSPATLSLSPGERATLSCRASQSVSSYLAWYQQKPGQAPRLLIHDASNRATGTPARFSGSGSGTDFTLTVSSLEPEDFAVYYCQQRKDWPLTFGQGTRLEIK

SEQ ID NO: 1045 - protein, 111 aa, synthetic construct
  REGION 1..111: note = Description of sequence: Sequence Name: 71282-3
QSVLTQPPSVSGAPGQSVTISCTGSNSNIGAGYDVNWYQQIPGTAPKLLIYGHINRPSGVPDRFSGSKSGTSASLAITGLQAEDEADYYCQSYDSSLSGSVFGGGTKLTVL

SEQ ID NO: 1046 - protein, 107 aa, synthetic construct
  REGION 1..107: note = Description of sequence: Sequence Name: 71282-4
DIQMTQSPSAMSASVGDRVTITCRASQDINIYLAWFQQKPGKVPKRLIYAASNLQSGVPSRFSGRGSGAEFTLTISSLQPEDFATYYCLQHNNYPWTFGQGTKVAFK

SEQ ID NO: 1047 - protein, 108 aa, synthetic construct
  REGION 1..108: note = Description of sequence: Sequence Name: 71282-5
SYELTQPPSVSVSPGQTARITCSGDALPMQYGYWYQQKPGQAPVLVIKKDRERPSGIPERFSGSGSGTTLTLTISRVQAEDEADYFCQSADRSGKYVVFGGGTKLTVL

SEQ ID NO: 1048 - protein, 110 aa, synthetic construct
  REGION 1..110: note = Description of sequence: Sequence Name: 71282-6
QSVLTQPPSVSEAPRQRVTISCSGSSSNIGNNAVNWYQQLPGKAPKLLIYYNDLLPSGVSDRFSGSKSGTSASLAISGLQSEDEADYYCATWDDSLNAWVFGGGTKLTVL

SEQ ID NO: 1049 - protein, 107 aa, synthetic construct
  REGION 1..107: note = Description of sequence: Sequence Name: 71282-7
EIVLTQSPGTLSLSPGERATLSCRASQSVSSSYLAWYQQKPGQAPRLLIYGASSRATGIPDRFSGRGSGTDFTLTVSRLEPEDFAVYYCQHYGSSFTFGPGTKVEIK

SEQ ID NO: 1050 - protein, 108 aa, synthetic construct
  REGION 1..108: note = Description of sequence: Sequence Name: 71282-8
DIQMTQSPSSLSASVGDRVTITCRASQSINTYLNWYQQKPGKAPKVLIYAASSLQSGVPSRFSGSGSGTDFTLTISSLQPEDFATYYCQQSYSTPMYTFGQGTKLEIK

SEQ ID NO: 1051 - protein, 108 aa, synthetic construct
  REGION 1..108: note = Description of sequence: Sequence Name: 71282-9
EIVLTQSPGTLSLSPGERVTLSCRASQYFSSSHLAWYQHRPGQAPRLLMYGASYRATGIPDRFSGSVSGTDFTLTISRLEPEDLAVYYCQYYGNSPRTFGQGTKLEIK

SEQ ID NO: 1052 - protein, 109 aa, synthetic construct
  REGION 1..109: note = Description of sequence: Sequence Name: 71282-10
EIVLTQSPGTLSLSPGERVTLSCRASQGVSSNYLAWYQQKPGQAPRLLIYGASSRATGVPDRFSGSGSGTDFTLTISGLEPEDFAVYYCQQYGSSPMYTFGQGTKLEIK

SEQ ID NO: 1053 - protein, 111 aa, synthetic construct
  REGION 1..111: note = Description of sequence: Sequence Name: 71282-11
QLVLTQSPSASASLGASVNLTCTLSSGHSSYAIAWHQQQPEKGPRFLMRLNSDGSHTKGDGIPDRFSGSSSGAARYLTISSLQSEDEADYYCQTWGTGIRVFGGGTKLTVL

SEQ ID NO: 1054 - protein, 107 aa, synthetic construct
  REGION 1..107: note = Description of sequence: Sequence Name: 71282-12
DIQMTQSPSSLSASVGDRVTITCRASQSISSYLNWYQQKPGKAPNLLIYAASSLQSGVPSRFSGSGSGTDFTLTISSLQPEDFATYYCQQDYSTPQTFGQGTKVEIK

SEQ ID NO: 1055 - protein, 107 aa, synthetic construct
  REGION 1..107: note = Description of sequence: Sequence Name: 71282-13
SYVLTQPPSVSVAPGKTATITCGGDNIGSKSVHWYQQKPGQAPVLVINDDGDRPSGIPERFSGSKSANTATLTISRVEAGDEADYHCQVWDPKTDYVFAGGTQVTVL

SEQ ID NO: 1056 - protein, 110 aa, synthetic construct
  REGION 1..110: note = Description of sequence: Sequence Name: 71282-14
QSVLTQPPSASGTPGQRVTISCSGSSSNIESNYVYWYQQLPGMAPKLLIYSNAQRPSGVPDRFSGSKSGTSASLAISGLRSEDEADYYCAAWDDSLSGYVFGTGTKVTVL

SEQ ID NO: 1057 - protein, 106 aa, synthetic construct
  REGION 1..106: note = Description of sequence: Sequence Name: 71282-15
DVQMTQSPSSLSAFVGDRVTITCRASQSINAYLNWYQQKPGKAPKLLIYAASSLQSGVTSRFSGSGFGTEFTLAIDSLQPEDFATYYCQQSYSPPTFGGGTRVEIR

SEQ ID NO: 1058 - protein, 106 aa, synthetic construct
  REGION 1..106: note = Description of sequence: Sequence Name: 71282-16
TQPPSVSVSPGQTASITCSGDKLDNKLDIRYTCWYQQKAGQPPVLLIYQGTERPSGISERFSVSDSGNTVTLTISGTQSMDEADYYCQTWDFTHVVFGGGTKLTVL

SEQ ID NO: 1059 - protein, 107 aa, synthetic construct
  REGION 1..107: note = Description of sequence: Sequence Name: 71282-17
EIVLTQSPDTLSLPPGERATLSCRASQAVSRSKVAWYQHKPGQAPRLLIYDASSRATDIPDRFSGSGSGTDFTLTISRLDPEDFAVYYCQEYASGYTFGQGTKLEVK

SEQ ID NO: 1060 - protein, 112 aa, synthetic construct
  REGION 1..112: note = Description of sequence: Sequence Name: 71282-18
DFLMTQTPLSLSVTPGQSASISCKSSQSLLHSDGKTYLYWYLQKPGQSPQLLIYEVSNRFSGVPDRFSGSGSGTDFTLKISRVEAEDVGVYYCMQNIQLLYTFGQGTKLEIK

SEQ ID NO: 1061 - protein, 106 aa, synthetic construct
  REGION 1..106: note = Description of sequence: Sequence Name: 71282-19
DIQMTQSPSTLSASVGDRVTITCRPSQSISQWLAWYQQKPGKAPKLLIFKASTLESGVPSRFSGSGSGTEFTLTISSLQPDDFATYYCQQYISFPTFGQGTKLEIR

SEQ ID NO: 1062 - protein, 106 aa, synthetic construct
  REGION 1..106: note = Description of sequence: Sequence Name: 71282-20
SYELTQPPSVSVSPGQTARITCSGDAWPKQYAYWYQQKPGQSPVLVIYKDSERPSGIPERFSGSSSGTTVTLTISGVQAEDEADYYCQSADSRGVVFGGGTRLTVL

SEQ ID NO: 1063 - DNA, 331 bp, synthetic construct; identical to SEQ ID NO: 945
  misc_feature 1..331: note = Description of sequence: Sequence Name: 71281-1
  source 1..331: mol_type = other DNA

SEQ ID NO: 1064 - DNA, 340 bp, synthetic construct; identical to SEQ ID NO: 946
  misc_feature 1..340: note = Description of sequence: Sequence Name: 71281-2
  source 1..340: mol_type = other DNA

SEQ ID NO: 1065 - DNA, 319 bp, synthetic construct; identical to SEQ ID NO: 947
  misc_feature 1..319: note = Description of sequence: Sequence Name: 71281-3
  source 1..319: mol_type = other DNA

SEQ ID NO: 1066 - DNA, 325 bp, synthetic construct; identical to SEQ ID NO: 948
  misc_feature 1..325: note = Description of sequence: Sequence Name: 71281-4
  source 1..325: mol_type = other DNA

SEQ ID NO: 1067 - DNA, 331 bp, synthetic construct; identical to SEQ ID NO: 949
  misc_feature 1..331: note = Description of sequence: Sequence Name: 71281-5
  source 1..331: mol_type = other DNA

SEQ ID NO: 1068 - DNA, 322 bp, synthetic construct; identical to SEQ ID NO: 950
  misc_feature 1..322: note = Description of sequence: Sequence Name: 71281-6
  source 1..322: mol_type = other DNA

SEQ ID NO: 1069 - DNA, 325 bp, synthetic construct; identical to SEQ ID NO: 951
  misc_feature 1..325: note = Description of sequence: Sequence Name: 71281-7
  source 1..325: mol_type = other DNA

SEQ ID NO: 1070 - DNA, 325 bp, synthetic construct; identical to SEQ ID NO: 952
  misc_feature 1..325: note = Description of sequence: Sequence Name: 71281-8
  source 1..325: mol_type = other DNA

SEQ ID NO: 1071 - DNA, 325 bp, synthetic construct; identical to SEQ ID NO: 953
  misc_feature 1..325: note = Description of sequence: Sequence Name: 71281-9
  source 1..325: mol_type = other DNA

SEQ ID NO: 1072 - DNA, 337 bp, synthetic construct; identical to SEQ ID NO: 954
  misc_feature 1..337: note = Description of sequence: Sequence Name: 71281-10
  source 1..337: mol_type = other DNA

SEQ ID NO: 1073 - DNA, 322 bp, synthetic construct; identical to SEQ ID NO: 955
  misc_feature 1..322: note = Description of sequence: Sequence Name: 71281-11
  source 1..322: mol_type = other DNA

SEQ ID NO: 1074 - DNA, 325 bp, synthetic construct; identical to SEQ ID NO: 956
  misc_feature 1..325: note = Description of sequence: Sequence Name: 71281-12
  source 1..325: mol_type = other DNA

SEQ ID NO: 1075 - DNA, 325 bp, synthetic construct; identical to SEQ ID NO: 957
  misc_feature 1..325: note = Description of sequence: Sequence Name: 71281-13
  source 1..325: mol_type = other DNA

SEQ ID NO: 1076 - DNA, 322 bp, synthetic construct; identical to SEQ ID NO: 958
  misc_feature 1..322: note = Description of sequence: Sequence Name: 71281-14
  source 1..322: mol_type = other DNA

SEQ ID NO: 1077 - DNA, 325 bp, synthetic construct; identical to SEQ ID NO: 959
  misc_feature 1..325: note = Description of sequence: Sequence Name: 71281-15
  source 1..325: mol_type = other DNA

SEQ ID NO: 1078 - DNA, 328 bp, synthetic construct; identical to SEQ ID NO: 960
  misc_feature 1..328: note = Description of sequence: Sequence Name: 71281-16
  source 1..328: mol_type = other DNA

SEQ ID NO: 1079 - DNA, 322 bp, synthetic construct; identical to SEQ ID NO: 961
  misc_feature 1..322: note = Description of sequence: Sequence Name: 71281-17
  source 1..322: mol_type = other DNA

SEQ ID NO: 1080 - DNA, 334 bp, synthetic construct; identical to SEQ ID NO: 962
  misc_feature 1..334: note = Description of sequence: Sequence Name: 71281-18
  source 1..334: mol_type = other DNA

SEQ ID NO: 1081 - DNA, 331 bp, synthetic construct; identical to SEQ ID NO: 963
  misc_feature 1..331: note = Description of sequence: Sequence Name: 71281-19
  source 1..331: mol_type = other DNA

SEQ ID NO: 1082 - DNA, 337 bp, synthetic construct; identical to SEQ ID NO: 964
  misc_feature 1..337: note = Description of sequence: Sequence Name: 71281-20
  source 1..337: mol_type = other DNA

SEQ ID NO: 1083 - DNA, 325 bp, synthetic construct; identical to SEQ ID NO: 965
  misc_feature 1..325: note = Description of sequence: Sequence Name: 71281-21
  source 1..325: mol_type = other DNA

SEQ ID NO: 1084 - DNA, 334 bp, synthetic construct; identical to SEQ ID NO: 966
  misc_feature 1..334: note = Description of sequence: Sequence Name: 71281-22
  source 1..334: mol_type = other DNA

SEQ ID NO: 1085 - DNA, 325 bp, synthetic construct; identical to SEQ ID NO: 967
  misc_feature 1..325: note = Description of sequence: Sequence Name: 71281-23
  source 1..325: mol_type = other DNA

SEQ ID NO: 1086 - DNA, 340 bp, synthetic construct; identical to SEQ ID NO: 968
  misc_feature 1..340: note = Description of sequence: Sequence Name: 71281-24
  source 1..340: mol_type = other DNA

SEQ ID NO: 1087 - DNA, 337 bp, synthetic construct; identical to SEQ ID NO: 969
  misc_feature 1..337: note = Description of sequence: Sequence Name: 71281-25
  source 1..337: mol_type = other DNA

SEQ ID NO: 1088 - DNA, 331 bp, synthetic construct; identical to SEQ ID NO: 970
  misc_feature 1..331: note = Description of sequence: Sequence Name: 71281-26
  source 1..331: mol_type = other DNA

SEQ ID NO: 1089 - DNA, 331 bp, synthetic construct; identical to SEQ ID NO: 971
  misc_feature 1..331: note = Description of sequence: Sequence Name: 71281-27
  source 1..331: mol_type = other DNA

SEQ ID NO: 1090 - DNA, 340 bp, synthetic construct; identical to SEQ ID NO: 972
  misc_feature 1..340: note = Description of sequence: Sequence Name: 71281-28
  source 1..340: mol_type = other DNA

SEQ ID NO: 1091 - DNA, 334 bp, synthetic construct; identical to SEQ ID NO: 973
  misc_feature 1..334: note = Description of sequence: Sequence Name: 71281-29
  source 1..334: mol_type = other DNA

SEQ ID NO: 1092 - DNA, 322 bp, synthetic construct; identical to SEQ ID NO: 974
  misc_feature 1..322: note = Description of sequence: Sequence Name: 71281-30
  source 1..322: mol_type = other DNA

SEQ ID NO: 1093 - DNA, 325 bp, synthetic construct; identical to SEQ ID NO: 975
  misc_feature 1..325: note = Description of sequence: Sequence Name: 71281-31
  source 1..325: mol_type = other DNA

SEQ ID NO: 1094 - DNA, 328 bp, synthetic construct; identical to SEQ ID NO: 976
  misc_feature 1..328: note = Description of sequence: Sequence Name: 71281-32
  source 1..328: mol_type = other DNA

SEQ ID NO: 1095 - DNA, 316 bp, synthetic construct; identical to SEQ ID NO: 977
  misc_feature 1..316: note = Description of sequence: Sequence Name: 71281-33
  source 1..316: mol_type = other DNA

SEQ ID NO: 1096 - DNA, 322 bp, synthetic construct; identical to SEQ ID NO: 978
  misc_feature 1..322: note = Description of sequence: Sequence Name: 71281-34
  source 1..322: mol_type = other DNA

SEQ ID NO: 1097 - DNA, 322 bp, synthetic construct; identical to SEQ ID NO: 979
  misc_feature 1..322: note = Description of sequence: Sequence Name: 71281-35
  source 1..322: mol_type = other DNA

SEQ ID NO: 1098 - DNA, 325 bp, synthetic construct; identical to SEQ ID NO: 980
  misc_feature 1..325: note = Description of sequence: Sequence Name: 71281-36
  source 1..325: mol_type = other DNA

SEQ ID NO: 1099 - DNA, 322 bp, synthetic construct; identical to SEQ ID NO: 981
  misc_feature 1..322: note = Description of sequence: Sequence Name: 71281-37
  source 1..322: mol_type = other DNA

SEQ ID NO: 1100 - DNA, 331 bp, synthetic construct; identical to SEQ ID NO: 982
  misc_feature 1..331: note = Description of sequence: Sequence Name: 71281-38
  source 1..331: mol_type = other DNA

SEQ ID NO: 1101 - DNA, 322 bp, synthetic construct; identical to SEQ ID NO: 983
  misc_feature 1..322: note = Description of sequence: Sequence Name: 71281-39
  source 1..322: mol_type = other DNA

SEQ ID NO: 1102 - DNA, 334 bp, synthetic construct; identical to SEQ ID NO: 984
  misc_feature 1..334: note = Description of sequence: Sequence Name: 71282-1
  source 1..334: mol_type = other DNA

SEQ ID NO: 1103 - DNA, 322 bp, synthetic construct; identical to SEQ ID NO: 985
  misc_feature 1..322: note = Description of sequence: Sequence Name: 71282-2
  source 1..322: mol_type = other DNA

SEQ ID NO: 1104 - DNA, 334 bp, synthetic construct; identical to SEQ ID NO: 986
  misc_feature 1..334: note = Description of sequence: Sequence Name: 71282-3
  source 1..334: mol_type = other DNA

SEQ ID NO: 1105 - DNA, 322 bp, synthetic construct; identical to SEQ ID NO: 987
  misc_feature 1..322: note = Description of sequence: Sequence Name: 71282-4
  source 1..322: mol_type = other DNA

SEQ ID NO: 1106 - DNA, 325 bp, synthetic construct; identical to SEQ ID NO: 988
  misc_feature 1..325: note = Description of sequence: Sequence Name: 71282-5
  source 1..325: mol_type = other DNA

SEQ ID NO: 1107 - DNA, 331 bp, synthetic construct; identical to SEQ ID NO: 989
  misc_feature 1..331: note = Description of sequence: Sequence Name: 71282-6
  source 1..331: mol_type = other DNA

SEQ ID NO: 1108 - DNA, 322 bp, synthetic construct; identical to SEQ ID NO: 990
  misc_feature 1..322: note = Description of sequence: Sequence Name: 71282-7
  source 1..322: mol_type = other DNA

SEQ ID NO: 1109 - DNA, 325 bp, synthetic construct; identical to SEQ ID NO: 991
  misc_feature 1..325: note = Description of sequence: Sequence Name: 71282-8
  source 1..325: mol_type = other DNA

SEQ ID NO: 1110 - DNA, 325 bp, synthetic construct; identical to SEQ ID NO: 992
  misc_feature 1..325: note = Description of sequence: Sequence Name: 71282-9
  source 1..325: mol_type = other DNA

SEQ ID NO: 1111 - DNA, 328 bp, synthetic construct; identical to SEQ ID NO: 993
  misc_feature 1..328: note = Description of sequence: Sequence Name: 71282-10
  source 1..328: mol_type = other DNA

SEQ ID NO: 1112 - DNA, 334 bp, synthetic construct; identical to SEQ ID NO: 994
  misc_feature 1..334: note = Description of sequence: Sequence Name: 71282-11
  source 1..334: mol_type = other DNA

SEQ ID NO: 1113 - DNA, 322 bp, synthetic construct; identical to SEQ ID NO: 995
  misc_feature 1..322: note = Description of sequence: Sequence Name: 71282-12
  source 1..322: mol_type = other DNA

SEQ ID NO: 1114 - DNA, 322 bp, synthetic construct; identical to SEQ ID NO: 996
  misc_feature 1..322: note = Description of sequence: Sequence Name: 71282-13
  source 1..322: mol_type = other DNA

SEQ ID NO: 1115 - DNA, 331 bp, synthetic construct; identical to SEQ ID NO: 997
  misc_feature 1..331: note = Description of sequence: Sequence Name: 71282-14
  source 1..331: mol_type = other DNA

SEQ ID NO: 1116 - DNA, 319 bp, synthetic construct; identical to SEQ ID NO: 998
  misc_feature 1..319: note = Description of sequence: Sequence Name: 71282-15
  source 1..319: mol_type = other DNA

SEQ ID NO: 1117 - DNA, 319 bp, synthetic construct; identical to SEQ ID NO: 999
  misc_feature 1..319: note = Description of sequence: Sequence Name: 71282-16
  source 1..319: mol_type = other DNA

SEQ ID NO: 1118 - DNA, 322 bp, synthetic construct; identical to SEQ ID NO: 1000
  misc_feature 1..322: note = Description of sequence: Sequence Name: 71282-17
  source 1..322: mol_type = other DNA

SEQ ID NO: 1119 - DNA, 337 bp, synthetic construct; identical to SEQ ID NO: 1001
  misc_feature 1..337: note = Description of sequence: Sequence Name: 71282-18
  source 1..337: mol_type = other DNA

SEQ ID NO: 1120 - DNA, 319 bp, synthetic construct; identical to SEQ ID NO: 1002
  misc_feature 1..319: note = Description of sequence: Sequence Name: 71282-19
  source 1..319: mol_type = other DNA

SEQ ID NO: 1121 - DNA, 319 bp, synthetic construct; identical to SEQ ID NO: 1003
  misc_feature 1..319: note = Description of sequence: Sequence Name: Unnamed sequence
  source 1..319: mol_type = other DNA

SEQ ID NO: 1122 - DNA, 39 bp, synthetic construct
  misc_feature 1..39: note = Description of sequence: Sequence Name: 71281-1
  source 1..39: mol_type = other DNA
tgcggaacatgggatagcagcctgagtgcttttgtcttc

SEQ ID NO: 1123 - DNA, 33 bp, synthetic construct
  misc_feature 1..33: note = Description of sequence: Sequence Name: 71281-2
  source 1..33: mol_type = other DNA
tgtcaacaatattataacactcccctcactttc

SEQ ID NO: 1124 - DNA, 33 bp, synthetic construct
  misc_feature 1..33: note = Description of sequence: Sequence Name: 71281-3
  source 1..33: mol_type = other DNA
tgtcaggcgtgggctagtagcactgcgatattc

SEQ ID NO: 1125 - DNA, 36 bp, synthetic construct
  misc_feature 1..36: note = Description of sequence: Sequence Name: 71281-4
  source 1..36: mol_type = other DNA
tgtcagcagtataataactggccttcgtacactttt

SEQ ID NO: 1126 - DNA, 39 bp, synthetic construct
  misc_feature 1..39: note = Description of sequence: Sequence Name: 71281-5
  source 1..39: mol_type = other DNA
tgcggaacatgggatagcagcctgagagctgtggtattc

SEQ ID NO: 1127 - DNA, 33 bp, synthetic construct
  misc_feature 1..33: note = Description of sequence: Sequence Name: 71281-6
  source 1..33: mol_type = other DNA
tgtcaacagtatgagaatctgatattcactttc

SEQ ID NO: 1128 - DNA, 39 bp, synthetic construct
  misc_feature 1..39: note = Description of sequence: Sequence Name: 71281-7
  source 1..39: mol_type = other DNA
tgtcagtcagcagacaccggtggaacttttgtggtcttc

SEQ ID NO: 1129 - DNA, 36 bp, synthetic construct
  misc_feature 1..36: note = Description of sequence: Sequence Name: 71281-8
  source 1..36: mol_type = other DNA
tgtcaacagagttacagtgtccctccgctcactttc

SEQ ID NO: 1130 - DNA, 39 bp, synthetic construct
  misc_feature 1..39: note = Description of sequence: Sequence Name: 71281-9
  source 1..39: mol_type = other DNA
tgttactcaacagacagcactggtaatcatagggtgttc

SEQ ID NO: 1131 - DNA, 33 bp, synthetic construct
  misc_feature 1..33: note = Description of sequence: Sequence Name: 71281-10
  source 1..33: mol_type = other DNA
tgcatgcaagctctacaaattccgtggacgttc

SEQ ID NO: 1132 - DNA, 33 bp, synthetic construct
  misc_feature 1..33: note = Description of sequence: Sequence Name: 71281-11
  source 1..33: mol_type = other DNA
tgtcagcagtgtggtagttcacctcggacgttc

SEQ ID NO: 1133 - DNA, 39 bp, synthetic construct
  misc_feature 1..39: note = Description of sequence: Sequence Name: 71281-12
  source 1..39: mol_type = other DNA
tgtaattcccgggacagcagtggtaaccattgggtgttc

SEQ ID NO: 1134 - DNA, 36 bp, synthetic construct
  misc_feature 1..36: note = Description of sequence: Sequence Name: 71281-13
  source 1..36: mol_type = other DNA
tgtcaacagtatgataattcccctcggatcaccttc

SEQ ID NO: 1135 - DNA, 33 bp, synthetic construct
  misc_feature 1..33: note = Description of sequence: Sequence Name: 71281-14
  source 1..33: mol_type = other DNA
tgtcagcagcgtaacaagtggcccatcaccttc

SEQ ID NO: 1136 - DNA, 36 bp, synthetic construct
  misc_feature 1..36: note = Description of sequence: Sequence Name: 71281-15
  source 1..36: mol_type = other DNA
tgtcagcaacttgatcgttaccctccgttcaccttc

SEQ ID NO: 1137 - DNA, 36 bp, synthetic construct
  misc_feature 1..36: note = Description of sequence: Sequence Name: 71281-16
  source 1..36: mol_type = other DNA
tgtcagcactatggtagctcacctccgaggacgttc

SEQ ID NO: 1138 - DNA, 33 bp, synthetic construct
  misc_feature 1..33: note = Description of sequence: Sequence Name: 71281-17
  source 1..33: mol_type = other DNA
tgtcagcagcgtcggagctggccgtacactttt

SEQ ID NO: 1139 - DNA, 30 bp, synthetic construct
  misc_feature 1..30: note = Description of sequence: Sequence Name: 71281-18
  source 1..30: mol_type = other DNA
tgcatgcagggtacaaattggtggacgttc

SEQ ID NO: 1140 - DNA, 39 bp, synthetic construct
  misc_feature 1..39: note = Description of sequence: Sequence Name: 71281-19
  source 1..39: mol_type = other DNA
tgtgcagcatgggatgacagcctgagtggtccggttttc

SEQ ID NO: 1141 - DNA, 30 bp, synthetic construct
  misc_feature 1..30: note = Description of sequence: Sequence Name: 71281-20
  source 1..30: mol_type = other DNA
tgtcagcaatattatactactccggagttc

SEQ ID NO: 1142 - DNA, 36 bp, synthetic construct
  misc_feature 1..36: note = Description of sequence: Sequence Name: 71281-21
  source 1..36: mol_type = other DNA
tgtcagcaacgtggcaactggcccccgatcaccttc

SEQ ID NO: 1143 - DNA, 42 bp, synthetic construct
  misc_feature 1..42: note = Description of sequence: Sequence Name: 71281-22
  source 1..42: mol_type = other DNA
tgtgcaacatgggatgacagcctgagtggtctttatgtcttc

SEQ ID NO: 1144 - DNA, 33 bp, synthetic construct
  misc_feature 1..33: note = Description of sequence: Sequence Name: 71281-23
  source 1..33: mol_type = other DNA
tgtcagcactatgataactcagtctggacgttc

SEQ ID NO: 1145 - DNA, 33 bp, synthetic construct
  misc_feature 1..33: note = Description of sequence: Sequence Name: 71281-24
  source 1..33: mol_type = other DNA
tgtcagcaatattatagtgctccgtggacgttc

SEQ ID NO: 1146 - DNA, 33 bp, synthetic construct
  misc_feature 1..33: note = Description of sequence: Sequence Name: 71281-25
  source 1..33: mol_type = other DNA
tgcatgcaaggtacgcagtggccgtggactttt

SEQ ID NO: 1147 - DNA, 36 bp, synthetic construct
  misc_feature 1..36: note = Description of sequence: Sequence Name: 71281-26
  source 1..36: mol_type = other DNA
tgctactcacttacgaccaccaccacttgggtgttc

SEQ ID NO: 1148 - DNA, 39 bp, synthetic construct
  misc_feature 1..39: note = Description of sequence: Sequence Name: 71281-27
  source 1..39: mol_type = other DNA
tgcggaacatgggatagcagcctgagtactgaagtgttc

SEQ ID NO: 1149 - DNA, 33 bp, synthetic construct
  misc_feature 1..33: note = Description of sequence: Sequence Name: 71281-28
  source 1..33: mol_type = other DNA
tgtcagcaacattatagtactcctgttactttc

SEQ ID NO: 1150 - DNA, 39 bp, synthetic construct
  misc_feature 1..39: note = Description of sequence: Sequence Name: 71281-29
  source 1..39: mol_type = other DNA
tgccagtcctatgacagcagcctgagtggttgggtgttc

SEQ ID NO: 1151 - DNA, 33 bp, synthetic construct
  misc_feature 1..33: note = Description of sequence: Sequence Name: 71281-30
  source 1..33: mol_type = other DNA
tgtcaacaatatgatgatttcccggtcactttc

SEQ ID NO: 1152 - DNA, 39 bp, synthetic construct
  misc_feature 1..39: note = Description of sequence: Sequence Name: 71281-31
  source 1..39: mol_type = other DNA
tgtcaggtgtgggagagtagtagtgatcatgtgatattc

SEQ ID NO: 1153 - DNA, 33 bp, synthetic construct
  misc_feature 1..33: note = Description of sequence: Sequence Name: 71281-32
  source 1..33: mol_type = other DNA
tgcagctcatatacaaccagcagcgtggttttc

SEQ ID NO: 1154 - DNA, 27 bp, synthetic construct
  misc_feature 1..27: note = Description of sequence: Sequence Name: 71281-33
  source 1..27: mol_type = other DNA
tgccaacagtataatacgtacactttt

SEQ ID NO: 1155 - DNA, 33 bp, synthetic construct
  misc_feature 1..33: note = Description of sequence: Sequence Name: 71281-34
  source 1..33: mol_type = other DNA
tgtcaacaggttaatagttatcctcggacgttc

SEQ ID NO: 1156 - DNA, 33 bp, synthetic construct
  misc_feature 1..33: note = Description of sequence: Sequence Name: 71281-35
  source 1..33: mol_type = other DNA
tgtcaacagtatgataatttacctcgcactttt

SEQ ID NO: 1157 - DNA, 33 bp, synthetic construct
  misc_feature 1..33: note = Description of sequence: Sequence Name: 71281-36
  source 1..33: mol_type = other DNA
tgtcagcagtatagtaggtcaccgtacagtttt

SEQ ID NO: 1158 - DNA, 33 bp, synthetic construct
  misc_feature 1..33: note = Description of sequence: Sequence Name: 71281-37
  source 1..33: mol_type = other DNA
tgtcaacagtatgataatctcccaatgaccttc

SEQ ID NO: 1159 - DNA, 39 bp, synthetic construct
  misc_feature 1..39: note = Description of sequence: Sequence Name: 71281-38
  source 1..39: mol_type = other DNA
tgtgcagcatgggatgacagcctgaatggtcgggtgttc

SEQ ID NO: 1160 - DNA, 33 bp, synthetic construct
  misc_feature 1..33: note = Description of sequence: Sequence Name: 71281-39
  source 1..33: mol_type = other DNA
tgtctacagcataatactttcccgtacagtttt

SEQ ID NO: 1161 - DNA, 39 bp, synthetic construct
  misc_feature 1..39: note = Description of sequence: Sequence Name: 71282-1
  source 1..39: mol_type = other DNA
tgccagtcctacgacagcagcttgagtggttcggtattc

SEQ ID NO: 1162 - DNA, 33 bp, synthetic construct
  misc_feature 1..33: note = Description of sequence: Sequence Name: 71282-2
  source 1..33: mol_type = other DNA
tgtcagcagcgtaaggactggcctctaactttt

SEQ ID NO: 1163 - DNA, 39 bp, synthetic construct
  misc_feature 1..39: note = Description of sequence: Sequence Name: 71282-3
  source 1..39: mol_type = other DNA
tgccagtcctatgacagcagcctgagtgggtcggtgttc

SEQ ID NO: 1164 - DNA, 33 bp, synthetic construct
  misc_feature 1..33: note = Description of sequence: Sequence Name: 71282-4
  source 1..33: mol_type = other DNA
tgtctacaacataataattacccttggacgttc

SEQ ID NO: 1165 - DNA, 39 bp, synthetic construct
  misc_feature 1..39: note = Description of sequence: Sequence Name: 71282-5
  source 1..39: mol_type = other DNA
tgtcagtcagcagacagaagtggaaaatatgtagttttc

SEQ ID NO: 1166 - DNA, 39 bp, synthetic construct
  misc_feature 1..39: note = Description of sequence: Sequence Name: 71282-6
  source 1..39: mol_type = other DNA
tgtgcaacatgggatgacagcctgaatgcctgggtgttc

SEQ ID NO: 1167 - DNA, 30 bp, synthetic construct
  misc_feature 1..30: note = Description of sequence: Sequence Name: 71282-7
  source 1..30: mol_type = other DNA
tgtcagcactatggtagctcattcactttc

SEQ ID NO: 1168 - DNA, 36 bp, synthetic construct
  misc_feature 1..36: note = Description of sequence: Sequence Name: 71282-8
  source 1..36: mol_type = other DNA
tgtcaacagagttacagtacccccatgtacactttt

SEQ ID NO: 1169 - DNA, 33 bp, synthetic construct
  misc_feature 1..33: note = Description of sequence: Sequence Name: 71282-9
  source 1..33: mol_type = other DNA
tgtcagtactatggtaactcacctaggactttt

SEQ ID NO: 1170 - DNA, 36 bp, synthetic construct
  misc_feature 1..36: note = Description of sequence: Sequence Name: 71282-10
  source 1..36: mol_type = other DNA
tgtcagcagtatggtagctcacccatgtacactttt

SEQ ID NO: 1171 - DNA, 33 bp, synthetic construct
  misc_feature 1..33: note = Description of sequence: Sequence Name: 71282-11
  source 1..33: mol_type = other DNA
tgtcagacctggggcactggcattcgagtgttc

SEQ ID NO: 1172 - DNA, 33 bp, synthetic construct
  misc_feature 1..33: note = Description of sequence: Sequence Name: 71282-12
  source 1..33: mol_type = other DNA
tgtcaacaggattacagtacccctcaaacgttc

SEQ ID NO: 1173 - DNA, 36 bp, synthetic construct
  misc_feature 1..36: note = Description of sequence: Sequence Name: 71282-13
  source 1..36: mol_type = other DNA
tgtcaggtgtgggatcccaagactgattatgtcttc

SEQ ID NO: 1174 - DNA, 39 bp, synthetic construct
  misc_feature 1..39: note = Description of sequence: Sequence Name: 71282-14
  source 1..39: mol_type = other DNA
tgtgcagcatgggatgacagcctgagtggttatgtcttc

SEQ ID NO: 1175 - DNA, 30 bp, synthetic construct
  misc_feature 1..30: note = Description of sequence: Sequence Name: 71282-15
  source 1..30: mol_type = other DNA
tgtcaacagagttacagtccccccactttc

SEQ ID NO: 1176 - DNA, 33 bp, synthetic construct
  misc_feature 1..33: note = Description of sequence: Sequence Name: 71282-16
  source 1..33: mol_type = other DNA
tgtcagacgtgggacttcactcatgtggttttc

SEQ ID NO: 1177 - DNA, 30 bp, synthetic construct
  misc_feature 1..30: note = Description of sequence: Sequence Name: 71282-17
  source 1..30: mol_type = other DNA
tgtcaggaatatgctagcgggtacactttt

SEQ ID NO: 1178 - DNA, 33 bp, synthetic construct
  misc_feature 1..33: note = Description of sequence: Sequence Name: 71282-18
  source 1..33: mol_type = other DNA
tgcatgcaaaatatacagcttctgtacactttt

SEQ ID NO: 1179 - DNA, 30 bp, synthetic construct
  misc_feature 1..30: note = Description of sequence: Sequence Name: 71282-19
  source 1..30: mol_type = other DNA
tgccaacagtatataagttttccgactttt

SEQ ID NO: 1180 - DNA, 33 bp, synthetic construct
  misc_feature 1..33: note = Description of sequence: Sequence Name: Unnamed sequence
  source 1..33: mol_type = other DNA
tgtcaatcagcagacagcagaggtgtggtattc

SEQ ID NO: 1181 - DNA, 75 bp, synthetic construct
  misc_feature 1..75: note = Description of sequence: Sequence Name: 71281-1
  source 1..75: mol_type = other DNA
cagtctgtgttgacgcagccgccctcagtgtctgcggccccaggacagaaggtcaccatctcctgctctggaagc

SEQ ID NO: 1182 - DNA, 78 bp, synthetic construct
  misc_feature 1..78: note = Description of sequence: Sequence Name: 71281-2
  source 1..78: mol_type = other DNA
gacatcgtgatgacccagtctccagactccctggctgtgtctctgggcgagggggccaccgtcaactgcaagtccagc

SEQ ID NO: 1183 - DNA, 75 bp, synthetic construct
  misc_feature 1..75: note = Description of sequence: Sequence Name: 71281-3
  source 1..75: mol_type = other DNA
tcctatgagctgactcagccaccctcagtgtccgtgtccccaggacagacagccagcatcacctgctctggagat

SEQ ID NO: 1184 - DNA, 78 bp, synthetic construct
  misc_feature 1..78: note = Description of sequence: Sequence Name: 71281-4
  source 1..78: mol_type = other DNA
gaaatagtgatgacgcagtctccagccaccctgtctgtgtctccaggggaaagagccaccctctcctgcagggccagt

SEQ ID NO: 1185 - DNA, 75 bp, synthetic construct; identical to SEQ ID NO: 1181
  misc_feature 1..75: note = Description of sequence: Sequence Name: 71281-5
  source 1..75: mol_type = other DNA

SEQ ID NO: 1186 - DNA, 78 bp, synthetic construct
  misc_feature 1..78: note = Description of sequence: Sequence Name: 71281-6
  source 1..78: mol_type = other DNA
gacatccagatgacccagtctccatcctccctgtctgcatctgtaggagacagagtcaccatcacttgccaggcgagt

SEQ ID NO: 1187 - DNA, 75 bp, synthetic construct
  misc_feature 1..75: note = Description of sequence: Sequence Name: 71281-7
  source 1..75: mol_type = other DNA
tcccatgagctgacacagccaccctcggtgtcagtgtccccaagacagacggccaggatcacctgctctggagat

SEQ ID NO: 1188 - DNA, 78 bp, synthetic construct
  misc_feature 1..78: note = Description of sequence: Sequence Name: 71281-8
  source 1..78: mol_type = other DNA
gacatccagatgacccagtctccatcctccctgtctgcatctgtaggagacagggtcaccatcacttgccgggcaagt

SEQ ID NO: 1189 - DNA, 75 bp, synthetic construct
  misc_feature 1..75: note = Description of sequence: Sequence Name: 71281-9
  source 1..75: mol_type = other DNA
tcctatgagctgacacagccaccctcggtgtcagtgtccccaggacaaacggccaggatcacctgctctggagat

SEQ ID NO: 1190 - DNA, 78 bp, synthetic construct
  misc_feature 1..78: note = Description of sequence: Sequence Name: 71281-10
  source 1..78: mol_type = other DNA
gatgttgtgatgactcagtctccaccctccctgcccgccacccctggagagccggcctccatctcctgcaggtctagt

SEQ ID NO: 1191 - DNA, 78 bp, synthetic construct
  misc_feature 1..78: note = Description of sequence: Sequence Name: 71281-11
  source 1..78: mol_type = other DNA
gaaattgtgttgacgcagtctccaggcaccctctctttgtctccaggggaaagagccaccctctcctgcagggccagt

SEQ ID NO: 1192 - DNA, 75 bp, synthetic construct
  misc_feature 1..75: note = Description of sequence: Sequence Name: 71281-12
  source 1..75: mol_type = other DNA
tcttctgagttgactcaggaccctgctgtgtctgtggccttgggacagacagtcaggatcacatgccaaggagac

SEQ ID NO: 1193 - DNA, 78 bp, synthetic construct
  misc_feature 1..78: note = Description of sequence: Sequence Name: 71281-13
  source 1..78: mol_type = other DNA
gacatccagatgacccagtctccatcctccctgtctgcatctgtgggagacagagtcaccatcacttgccaggcgagt

SEQ ID NO: 1194 - DNA, 78 bp, synthetic construct
  misc_feature 1..78: note = Description of sequence: Sequence Name: 71281-14
  source 1..78: mol_type = other DNA
gaaattgtgttgacacagtctccagccaccctgtctttgtctccaggggaaagagccaccctctcctgcagggccact

SEQ ID NO: 1195 - DNA, 78 bp, synthetic construct
  misc_feature 1..78: note = Description of sequence: Sequence Name: 71281-15
  source 1..78: mol_type = other DNA
gacatccagttgacccagtctccatccttcctgtctgcatctgtgggagacagtatcagcatcacttgccgggccagt

SEQ ID NO: 1196 - DNA, 78 bp, synthetic construct
  misc_feature 1..78: note = Description of sequence: Sequence Name: 71281-16
  source 1..78: mol_type = other DNA
gaaattgtgttgacgcagtctccaggcaccctgtctttgtctccaggggaaagagccaccctctcctgcagggccagt

SEQ ID NO: 1197 - DNA, 78 bp, synthetic construct
  misc_feature 1..78: note = Description of sequence: Sequence Name: 71281-17
  source 1..78: mol_type = other DNA
gaaattgtgttgacacagtctccagccaccctgtctttgtctccaggggaaagagccaccctctcctgcagggccagt

SEQ ID NO: 1198 - DNA, 78 bp, synthetic construct
  misc_feature 1..78: note = Description of sequence: Sequence Name: 71281-18
  source 1..78: mol_type = other DNA
gatgttgtgatgactcagtttccactctccctgcccgtcacccttggacagccggcctccatctcctgcaggtctagt

SEQ ID NO: 1199 - DNA, 75 bp, synthetic construct
  misc_feature 1..75: note = Description of sequence: Sequence Name: 71281-19
  source 1..75: mol_type = other DNA
cagtctgtgctgactcagccaccctcagcgtctgggacccccgggcagagggtcaccatctcttgttctggaagc

SEQ ID NO: 1200 - DNA, 78 bp, synthetic construct
  misc_feature 1..78: note = Description of sequence: Sequence Name: 71281-20
  source 1..78: mol_type = other DNA
gacatcgtgatgacccagtctccagactccctggctgtgtctctgggcgagagggccaccatcaactgcaagtccagc

SEQ ID NO: 1201 - DNA, 78 bp, synthetic construct
  misc_feature 1..78: note = Description of sequence: Sequence Name: 71281-21
  source 1..78: mol_type = other DNA
gacattgtgttgacacagtctccagccaccctgtccttgtctcctggggagagagccaccctctcctgcagggccagt

SEQ ID NO: 1202 - DNA, 75 bp, synthetic construct; identical to SEQ ID NO: 1199
  misc_feature 1..75: note = Description of sequence: Sequence Name: 71281-22
  source 1..75: mol_type = other DNA

SEQ ID NO: 1203 - DNA, 78 bp, synthetic construct; identical to SEQ ID NO: 1196
  misc_feature 1..78: note = Description of sequence: Sequence Name: 71281-23
  source 1..78: mol_type = other DNA

SEQ ID NO: 1204 - DNA, 78 bp, synthetic construct; identical to SEQ ID NO: 1200
  misc_feature 1..78: note = Description of sequence: Sequence Name: 71281-24
  source 1..78: mol_type = other DNA

SEQ ID NO: 1205 - DNA, 78 bp, synthetic construct
  misc_feature 1..78: note = Description of sequence: Sequence Name: 71281-25
  source 1..78: mol_type = other DNA
gatgttgtgatgactcagtctccactctccctgcccgtcactattggacagccggcctccatctcctgcaggtctagt

SEQ ID NO: 1206 - DNA, 75 bp, synthetic construct
  misc_feature 1..75: note = Description of sequence: Sequence Name: 71281-26
  source 1..75: mol_type = other DNA
cagtctgccctgactcagcctgcctccgtgtctgggtctcctggacagtcgatcaccatctcctgcactggaacc

SEQ ID NO: 1207 - DNA, 75 bp, synthetic construct; identical to SEQ ID NO: 1181
  misc_feature 1..75: note = Description of sequence: Sequence Name: 71281-27
  source 1..75: mol_type = other DNA

SEQ ID NO: 1208 - DNA, 78 bp, synthetic construct
  misc_feature 1..78: note = Description of sequence: Sequence Name: 71281-28
  source 1..78: mol_type = other DNA
gacatcgtgatgacccagtctctagactccctggctgtgtctctgggcgagagggccaccatccactgcaagtccagc

SEQ ID NO: 1209 - DNA, 75 bp, synthetic construct
  misc_feature 1..75: note = Description of sequence: Sequence Name: 71281-29
  source 1..75: mol_type = other DNA
cagtctgtgctgacgcagccgccctcagtgtctggggccccagggcagagggtcaccatctcctgcactgggagc

SEQ ID NO: 1210 - DNA, 78 bp, synthetic construct
  misc_feature 1..78: note = Description of sequence: Sequence Name: 71281-30
  source 1..78: mol_type = other DNA
gacatccggttgacccagtctccaacctccctgtctccatctgtcggagacagagtcatcatcacttgtcaggcgagt

SEQ ID NO: 1211 - DNA, 75 bp, synthetic construct
  misc_feature 1..75: note = Description of sequence: Sequence Name: 71281-31
  source 1..75: mol_type = other DNA
tcctatgtgctgactcaaccaccctcggtgtcagtggccccagcacagacggccaggattacctgtgggggaaac

SEQ ID NO: 1212 - DNA, 75 bp, synthetic construct
  misc_feature 1..75: note = Description of sequence: Sequence Name: 71281-32
  source 1..75: mol_type = other DNA
cagtctgccctgactcagcctgcctccgtgtctgggtctcctggacagtcgatcaccatctcctgcactgcaacc

SEQ ID NO: 1213 - DNA, 78 bp, synthetic construct
  misc_feature 1..78: note = Description of sequence: Sequence Name: 71281-33
  source 1..78: mol_type = other DNA
gacacccagatgacccagtctccttccatcctgtctgcatctgtaggagacagagtcaccatcacttgccgggccagt

SEQ ID NO: 1214 - DNA, 78 bp, synthetic construct
  misc_feature 1..78: note = Description of sequence: Sequence Name: 71281-34
  source 1..78: mol_type = other DNA
gacatccagttgacccagtctccatccttcctgtctgcatctgtaggagacagagtcaccatcgcttgccgggccagt

SEQ ID NO: 1215 - DNA, 78 bp, synthetic construct; identical to SEQ ID NO: 1186
  misc_feature 1..78: note = Description of sequence: Sequence Name: 71281-35
  source 1..78: mol_type = other DNA

SEQ ID NO: 1216 - DNA, 78 bp, synthetic construct
  misc_feature 1..78: note = Description of sequence: Sequence Name: 71281-36
  source 1..78: mol_type = other DNA
gaggttgtgttgacgcagtctccaggcaccctgtctttgtctccaggggaaagtgccaccctctcctgcagggccagt

SEQ ID NO: 1217 - DNA, 78 bp, synthetic construct; identical to SEQ ID NO: 1186
  misc_feature 1..78: note = Description of sequence: Sequence Name: 71281-37
  source 1..78: mol_type = other DNA

SEQ ID NO: 1218 - DNA, 75 bp, synthetic construct
  misc_feature 1..75: note = Description of sequence: Sequence Name: 71281-38
  source 1..75: mol_type = other DNA
cagtctgtgctgactcaggcaccctcagcgtctgggacccccgggcagagggtcaccatctcctgttctggaagc

SEQ ID NO: 1219 - DNA, 78 bp, synthetic construct
  misc_feature 1..78: note = Description of sequence: Sequence Name: 71281-39
  source 1..78: mol_type = other DNA
gacatccaaatgacccagtctccatcctccctgtctgcatctgtaggagacagagtcaccatcacttgccgggcaagt

SEQ ID NO: 1220 - DNA, 75 bp, synthetic construct; identical to SEQ ID NO: 1209
  misc_feature 1..75: note = Description of sequence: Sequence Name: 71282-1
  source 1..75: mol_type = other DNA

SEQ ID NO: 1221 - DNA, 78 bp, synthetic construct; identical to SEQ ID NO: 1197
  misc_feature 1..78: note = Description of sequence: Sequence Name: 71282-2
  source 1..78: mol_type = other DNA

SEQ ID NO: 1222 - DNA, 75 bp, synthetic construct
  misc_feature 1..75: note = Description of sequence: Sequence Name: 71282-3
  source 1..75: mol_type = other DNA
cagtctgtgctgacgcagccgccctcagtgtctggggccccagggcagagtgtcaccatctcctgcactgggagc

SEQ ID NO: 1223 - DNA, 78 bp, synthetic construct
  misc_feature 1..78: note = Description of sequence: Sequence Name: 71282-4
  source 1..78: mol_type = other DNA
gacatccagatgacccagtctccatctgccatgtctgcatctgtaggagacagagtcaccatcacttgtcgggcgagt

SEQ ID NO: 1224 - DNA, 75 bp, synthetic construct
  misc_feature 1..75: note = Description of sequence: Sequence Name: 71282-5
  source 1..75: mol_type = other DNA
tcctatgagctgacacagccaccgtcggtgtcagtgtccccaggacagacggccaggatcacctgctctggagat

SEQ ID NO: 1225 - DNA, 75 bp, synthetic construct
  misc_feature 1..75: note = Description of sequence: Sequence Name: 71282-6
  source 1..75: mol_type = other DNA
cagtctgtgctgactcagccaccctcggtgtctgaagcccccaggcagagggtcaccatctcctgttctggaagc

SEQ ID NO: 1226 - DNA, 78 bp, synthetic construct; identical to SEQ ID NO: 1196
  misc_feature 1..78: note = Description of sequence: Sequence Name: 71282-7
  source 1..78: mol_type = other DNA

SEQ ID NO: 1227 - DNA, 78 bp, synthetic construct
  misc_feature 1..78: note = Description of sequence: Sequence Name: 71282-8
  source 1..78: mol_type = other DNA
gacatccagatgacccagtctccatcctccctgtctgcatctgtaggagacagagtcaccatcacttgccgggcaagt

SEQ ID NO: 1228 - DNA, 78 bp, synthetic construct
  misc_feature 1..78: note = Description of sequence: Sequence Name: 71282-9
  source 1..78: mol_type = other DNA
gaaattgtgttgacgcagtctccaggcaccctgtctttgtctccaggggaaagagtcaccctctcctgcagggccagt

SEQ ID NO: 1229 - DNA, 78 bp, synthetic construct; identical to SEQ ID NO: 1228
  misc_feature 1..78: note = Description of sequence: Sequence Name: 71282-10
  source 1..78: mol_type = other DNA

SEQ ID NO: 1230 - DNA, 75 bp, synthetic construct
  misc_feature 1..75: note = Description of sequence: Sequence Name: 71282-11
  source 1..75: mol_type = other DNA
cagcttgtgctgactcaatcgccctctgcctctgcctccctgggagcctcggtcaacctcacctgcactctgagc

SEQ ID NO: 1231 - DNA, 78 bp, synthetic construct; identical to SEQ ID NO: 1227
  misc_feature 1..78: note = Description of sequence: Sequence Name: 71282-12
  source 1..78: mol_type = other DNA

SEQ ID NO: 1232 - DNA, 75 bp, synthetic construct
  misc_feature 1..75: note = Description of sequence: Sequence Name: 71282-13
  source 1..75: mol_type = other DNA
tcctatgtgctgactcagccaccctcagtgtcagtggccccaggaaagacggccacgattacctgtgggggtgac

SEQ ID NO: 1233 - DNA, 75 bp, synthetic construct; identical to SEQ ID NO: 1199
  misc_feature 1..75: note = Description of sequence: Sequence Name: 71282-14
  source 1..75: mol_type = other DNA

SEQ ID NO: 1234 - DNA, 78 bp, synthetic construct
  misc_feature 1..78: note = Description of sequence: Sequence Name: 71282-15
  source 1..78: mol_type = other DNA
gacgtccagatgacccagtctccatcctccctgtctgcatttgtaggtgacagagtcaccatcacttgccgggcaagt

SEQ ID NO: 1235 - DNA, 75 bp, synthetic construct
  misc_feature 1..75: note = Description of sequence: Sequence Name: 71282-16
  source 1..75: mol_type = other DNA
tcctatgaactgactcagccaccctcagtgtccgtgtccccaggacagacagcttccatcacctgttctggagat

SEQ ID NO: 1236 - DNA, 78 bp, synthetic construct
  misc_feature 1..78: note = Description of sequence: Sequence Name: 71282-17
  source 1..78: mol_type = other DNA
gaaattgtgttgacgcagtctccagacaccctgtctttgcctccaggtgaaagagccaccctctcctgcagggccagt

SEQ ID NO: 1237 - DNA, 78 bp, synthetic construct
  misc_feature 1..78: note = Description of sequence: Sequence Name: 71282-18
  source 1..78: mol_type = other DNA
gattttttgatgacccagactccactctctctgtccgtcacccctggacagtcggcctccatctcctgcaagtctagt

SEQ ID NO: 1238 - DNA, 78 bp, synthetic construct
  misc_feature 1..78: note = Description of sequence: Sequence Name: 71282-19
  source 1..78: mol_type = other DNA
gacatccagatgacccagtctccttccaccctgtctgcatctgtgggagacagagtcaccatcacttgccggcccagt

SEQ ID NO: 1239 - DNA, 75 bp, synthetic construct
  misc_feature 1..75: note = Description of sequence: Sequence Name: 71282-20
  source 1..75: mol_type = other DNA
tcctatgagctgacacagccaccctcggtgtcagtgtccccaggacagacggccaggatcacctgctctggagat

SEQ ID NO: 1240 - DNA, 51 bp, synthetic construct
  misc_feature 1..51: note = Description of sequence: Sequence Name: 71281-1
  source 1..51: mol_type = other DNA
gtatcctggtaccagcagctcccaggaacagcccccaaactcctcatctat

SEQ ID NO: 1241 - DNA, 51 bp, synthetic construct
  misc_feature 1..51: note = Description of sequence: Sequence Name: 71281-2
  source 1..51: mol_type = other DNA
ttagcttggtaccagcagaaaccaggacagcctcctaagttactcatttat

SEQ ID NO: 1242 - DNA, 51 bp, synthetic construct
  misc_feature 1..51: note = Description of sequence: Sequence Name: 71281-3
  source 1..51: mol_type = other DNA
gtttgctggtatcagcagaagccaggcctgtcccctctactggtcatctat

SEQ ID NO: 1243 - DNA, 51 bp, synthetic construct
  misc_feature 1..51: note = Description of sequence: Sequence Name: 71281-4
  source 1..51: mol_type = other DNA
ttagcctggtaccagcagaaacctggccaggctcccaggctcctcatctat

SEQ ID NO: 1244 - DNA, 51 bp, synthetic construct
  misc_feature 1..51: note = Description of sequence: Sequence Name: 71281-5
  source 1..51: mol_type = other DNA
gtatcctggtaccagctcctcccaggaagagcccccaaactcctcatccat

SEQ ID NO: 1245 - DNA, 51 bp, synthetic construct
  misc_feature 1..51: note = Description of sequence: Sequence Name: 71281-6
  source 1..51: mol_type = other DNA
ttaaattggtatcaacagaaaccagggaaagcccctaaactcctgatctac

SEQ ID NO: 1246 - DNA, 51 bp, synthetic construct
  misc_feature 1..51: note = Description of sequence: Sequence Name: 71281-7
  source 1..51: mol_type = other DNA
acttattggtaccagcagaagccaggccaggcccctctgttggtgatatat

SEQ ID NO: 1247 - DNA, 51 bp, synthetic construct
  misc_feature 1..51: note = Description of sequence: Sequence Name: 71281-8
  source 1..51: mol_type = other DNA
ttaaattggtatcagcagaagccagggaaagcccctaagctcctgatctat

SEQ ID NO: 1248 - DNA, 51 bp, synthetic construct
  misc_feature 1..51: note = Description of sequence: Sequence Name: 71281-9
  source 1..51: mol_type = other DNA
gcttattggtaccagcagaagtcaggccaggcccctgtgctggtcatctat

SEQ ID NO: 1249 - DNA, 51 bp, synthetic construct
  misc_feature 1..51: note = Description of sequence: Sequence Name: 71281-10
  source 1..51: mol_type = other DNA
ttgaattggtacctgcagaggccagggcagtctccacagctcctgatctac

SEQ ID NO: 1250 - DNA, 51 bp, synthetic construct
  misc_feature 1..51: note = Description of sequence: Sequence Name: 71281-11
  source 1..51: mol_type = other DNA
ttagcctggtatcagcagaaacctggccaggctcccaggctcctcatctat

SEQ ID NO: 1251 - DNA, 51 bp, synthetic construct
  misc_feature 1..51: note = Description of sequence: Sequence Name: 71281-12
  source 1..51: mol_type = other DNA
gcaagctggtaccagcagaagccaggacaggcccctgtacttgtcatcttt

SEQ ID NO: 1252 - DNA, 51 bp, synthetic construct
  misc_feature 1..51: note = Description of sequence: Sequence Name: 71281-13
  source 1..51: mol_type = other DNA
ttgaattggtatcaacaccggccagggaaagcccctcagctcctgatctac

SEQ ID NO: 1253 - DNA, 51 bp, synthetic construct
  misc_feature 1..51: note = Description of sequence: Sequence Name: 71281-14
  source 1..51: mol_type = other DNA
ttagcctggtaccaacagaaacctggccaggctcccaggctcctcatctat

SEQ ID NO: 1254 - DNA, 51 bp, synthetic construct
  misc_feature 1..51: note = Description of sequence: Sequence Name: 71281-15
  source 1..51: mol_type = other DNA
ttagcctggtatcaacaaaaaccagggaaagccccgaagctcctgatctat

SEQ ID NO: 1255 - DNA, 51 bp, synthetic construct; identical to SEQ ID NO: 1243
  misc_feature 1..51: note = Description of sequence: Sequence Name: 71281-16
  source 1..51: mol_type = other DNA

SEQ ID NO: 1256 - DNA, 51 bp, synthetic construct
  misc_feature 1..51: note = Description of sequence: Sequence Name: 71281-17
  source 1..51: mol_type = other DNA
ttagcctggttccaacagaaacctggccaggctcccaggctcctcatctat

SEQ ID NO: 1257 - DNA, 51 bp, synthetic construct
  misc_feature 1..51: note = Description of sequence: Sequence Name: 71281-18
  source 1..51: mol_type = other DNA
ttgagttggtttcaccagaggccaggccattctccaaggcgcctaattttt

SEQ ID NO: 1258 - DNA, 51 bp, synthetic construct
  misc_feature 1..51: note = Description of sequence: Sequence Name: 71281-19
  source 1..51: mol_type = other DNA
atatactggtaccagcagctcccaggaacggcccccaaactcctcatctat

SEQ ID NO: 1259 - DNA, 51 bp, synthetic construct
  misc_feature 1..51: note = Description of sequence: Sequence Name: 71281-20
  source 1..51: mol_type = other DNA
ttagcttggtaccagcagaaaccaggacagcctcctaagctcctcatttac

SEQ ID NO: 1260 - DNA, 51 bp, synthetic construct; identical to SEQ ID NO: 1253
  misc_feature 1..51: note = Description of sequence: Sequence Name: 71281-21
  source 1..51: mol_type = other DNA

SEQ ID NO: 1261 - DNA, 51 bp, synthetic construct
  misc_feature 1..51: note = Description of sequence: Sequence Name: 71281-22
  source 1..51: mol_type = other DNA
gtaaactggtaccagcagctcccaggaacggcccccaaactcctcgtctat

SEQ ID NO: 1262 - DNA, 51 bp, synthetic construct
  misc_feature 1..51: note = Description of sequence: Sequence Name: 71281-23
  source 1..51: mol_type = other DNA
ttagcctggtaccagcagaaccctggccagtctcccaggctcctcatctat

SEQ ID NO: 1263 - DNA, 51 bp, synthetic construct
  misc_feature 1..51: note = Description of sequence: Sequence Name: 71281-24
  source 1..51: mol_type = other DNA
ttagcttggtaccagcagaaaccaggacagcctcctaagctgctcatttac

SEQ ID NO: 1264 - DNA, 51 bp, synthetic construct
  misc_feature 1..51: note = Description of sequence: Sequence Name: 71281-25
  source 1..51: mol_type = other DNA
ttgaattggtttcagcagaggccaggccaatctccaaggcgcctaatttat

SEQ ID NO: 1265 - DNA, 51 bp, synthetic construct
  misc_feature 1..51: note = Description of sequence: Sequence Name: 71281-26
  source 1..51: mol_type = other DNA
gtctcttggtgccagcagcacccaggcaaagcccccaaactcatcatttat

SEQ ID NO: 1266 - DNA, 51 bp, synthetic construct
  misc_feature 1..51: note = Description of sequence: Sequence Name: 71281-27
  source 1..51: mol_type = other DNA
gtgtcctggtaccagcagttcccaggaacagcccccaaagtcctcatctat

SEQ ID NO: 1267 - DNA, 51 bp, synthetic construct
  misc_feature 1..51: note = Description of sequence: Sequence Name: 71281-28
  source 1..51: mol_type = other DNA
ttagcttggtaccagcataaaccaggacagcctcctaagctgctcatttac

SEQ ID NO: 1268 - DNA, 51 bp, synthetic construct
  misc_feature 1..51: note = Description of sequence: Sequence Name: 71281-29
  source 1..51: mol_type = other DNA
gtacactggtaccagcagtttccaggaacagcccccaaagtcctcatctat

SEQ ID NO: 1269 - DNA, 51 bp, synthetic construct
  misc_feature 1..51: note = Description of sequence: Sequence Name: 71281-30
  source 1..51: mol_type = other DNA
ttgagttggtatcagcaaaaaccaggacaagcccctaaactcctgatcaac

SEQ ID NO: 1270 - DNA, 51 bp, synthetic construct
  misc_feature 1..51: note = Description of sequence: Sequence Name: 71281-31
  source 1..51: mol_type = other DNA
gtgcactggtaccagcagaagccaggccaggcccctgtgctggtcgtctat

SEQ ID NO: 1271 - DNA, 51 bp, synthetic construct
  misc_feature 1..51: note = Description of sequence: Sequence Name: 71281-32
  source 1..51: mol_type = other DNA
gtctcctggtaccaacaccacccaggcaaagcccccaaactcatgatttat

SEQ ID NO: 1272 - DNA, 51 bp, synthetic construct
  misc_feature 1..51: note = Description of sequence: Sequence Name: 71281-33
  source 1..51: mol_type = other DNA
ttggcctggtatcagcagaaaccagggaaagcccctaagctcctgatctat

SEQ ID NO: 1273 - DNA, 51 bp, synthetic construct
  misc_feature 1..51: note = Description of sequence: Sequence Name: 71281-34
  source 1..51: mol_type = other DNA
ttagcctggtatcagcaaaagccagggaaagcccctgccctcctgatctat

SEQ ID NO: 1274 - DNA, 51 bp, synthetic construct
  misc_feature 1..51: note = Description of sequence: Sequence Name: 71281-35
  source 1..51: mol_type = other DNA
ttaaattggtatcagcagagaccagggaaagcccctaagctcctgatctac

SEQ ID NO: 1275 - DNA, 51 bp, synthetic construct
  misc_feature 1..51: note = Description of sequence: Sequence Name: 71281-36
  source 1..51: mol_type = other DNA
tttgcctggtaccagcagaaacctggccaggctcccaggctcctcatctat

SEQ ID NO: 1276 - DNA, 51 bp, synthetic construct
  misc_feature 1..51: note = Description of sequence: Sequence Name: 71281-37
  source 1..51: mol_type = other DNA
ttaaattggtatcagcagaaaccagggaaagcccctaaactcctgatctac

SEQ ID NO: 1277 - DNA, 51 bp, synthetic construct
  misc_feature 1..51: note = Description of sequence: Sequence Name: 71281-38
  source 1..51: mol_type = other DNA
gtcagctggtaccagcagctcccaggaacggcccccaaagtcctcatttat

SEQ ID NO: 1278 - DNA, 51 bp, synthetic construct
  misc_feature 1..51: note = Description of sequence: Sequence Name: 71281-39
  source 1..51: mol_type = other DNA
ttagcctggtatcagcagaaaccagggagagcccctaagcgcctgatctat

SEQ ID NO: 1279 - DNA, 51 bp, synthetic construct
  misc_feature 1..51: note = Description of sequence: Sequence Name: 71282-1
  source 1..51: mol_type = other DNA
gtacactggtaccagcagcttccaggaacagcccccaaactcctcatctat

SEQ ID NO: 1280 - DNA, 51 bp, synthetic construct
  misc_feature 1..51: note = Description of sequence: Sequence Name: 71282-2
  source 1..51: mol_type = other DNA
ttagcctggtaccaacagaaacctggccaggctcccaggctcctcatccat

SEQ ID NO: 1281 - DNA, 51 bp, synthetic construct
  misc_feature 1..51: note = Description of sequence: Sequence Name: 71282-3
  source 1..51: mol_type = other DNA
gtgaattggtaccagcagattcctggaacagcccccaaactcctcatctat

SEQ ID NO: 1282 - DNA, 51 bp, synthetic construct
  misc_feature 1..51: note = Description of sequence: Sequence Name: 71282-4
  source 1..51: mol_type = other DNA
ttagcctggtttcagcagaaaccagggaaagtccctaagcgcctgatctat

SEQ ID NO: 1283 - DNA, 51 bp, synthetic construct
  misc_feature 1..51: note = Description of sequence: Sequence Name: 71282-5
  source 1..51: mol_type = other DNA
ggttattggtaccagcagaagccaggccaggcccctgtgttggtgataaag

SEQ ID NO: 1284 - DNA, 51 bp, synthetic construct
  misc_feature 1..51: note = Description of sequence: Sequence Name: 71282-6
  source 1..51: mol_type = other DNA
gtaaactggtaccagcagctcccaggaaaggctcccaaactcctcatctat

SEQ ID NO: 1285 - DNA, 51 bp, synthetic construct; identical to SEQ ID NO: 1243
  misc_feature 1..51: note = Description of sequence: Sequence Name: 71282-7
  source 1..51: mol_type = other DNA

SEQ ID NO: 1286 - DNA, 51 bp, synthetic construct
  misc_feature 1..51: note = Description of sequence: Sequence Name: 71282-8
  source 1..51: mol_type = other DNA
ttaaattggtatcagcagaaaccagggaaagcccctaaggtcctgatctat

SEQ ID NO: 1287 - DNA, 51 bp, synthetic construct
  misc_feature 1..51: note = Description of sequence: Sequence Name: 71282-9
  source 1..51: mol_type = other DNA
ttagcctggtaccagcatagacctggccaggctcccaggctcctcatgtat

SEQ ID NO: 1288 - DNA, 51 bp, synthetic construct; identical to SEQ ID NO: 1243
  misc_feature 1..51: note = Description of sequence: Sequence Name: 71282-10
  source 1..51: mol_type = other DNA

SEQ ID NO: 1289 - DNA, 51 bp, synthetic construct
  misc_feature 1..51: note = Description of sequence: Sequence Name: 71282-11
  source 1..51: mol_type = other DNA
atcgcatggcatcagcagcagccagagaagggccctcggttcttgatgagg

SEQ ID NO: 1290 - DNA, 51 bp, synthetic construct
  misc_feature 1..51: note = Description of sequence: Sequence Name: 71282-12
  source 1..51: mol_type = other DNA
ttaaattggtatcagcagaaaccagggaaagcccctaacctcctgatctac

SEQ ID NO: 1291 - DNA, 51 bp, synthetic construct
  misc_feature 1..51: note = Description of sequence: Sequence Name: 71282-13
  source 1..51: mol_type = other DNA
gtacactggtaccaacagaagccaggccaggcccctgtgctggtcattaat

SEQ ID NO: 1292 - DNA, 51 bp, synthetic construct
  misc_feature 1..51: note = Description of sequence: Sequence Name: 71282-14
  source 1..51: mol_type = other DNA
gtatactggtaccagcagctcccaggaatggcccccaaactcctcatctat

SEQ ID NO: 1293 - DNA, 51 bp, synthetic construct
  misc_feature 1..51: note = Description of sequence: Sequence Name: 71282-15
  source 1..51: mol_type = other DNA
ttgaattggtatcagcaaaaaccaggaaaagcccctaaactcctgatctat

SEQ ID NO: 1294 - DNA, 51 bp, synthetic construct
  misc_feature 1..51: note = Description of sequence: Sequence Name: 71282-16
  source 1..51: mol_type = other DNA
acttgttggtatcaacagaaggcaggccagccccctgtgttgctcatttat

SEQ ID NO: 1295 - DNA, 51 bp, synthetic construct
  misc_feature 1..51: note = Description of sequence: Sequence Name: 71282-17
  source 1..51: mol_type = other DNA
gtggcctggtatcagcacaaacctggccaggctcccaggctcctcatctat

SEQ ID NO: 1296 - DNA, 51 bp, synthetic construct
  misc_feature 1..51: note = Description of sequence: Sequence Name: 71282-18
  source 1..51: mol_type = other DNA
ttgtattggtacctgcagaagccaggccagtctccacagctcctgatctat

SEQ ID NO: 1297 - DNA, 51 bp, synthetic construct
  misc_feature 1..51: note = Description of sequence: Sequence Name: 71282-19
  source 1..51: mol_type = other DNA
ttggcctggtaccagcagaaaccagggaaagccccaaagctcctaatcttt

SEQ ID NO: 1298 - DNA, 51 bp, synthetic construct
  misc_feature 1..51: note = Description of sequence: Sequence Name: 71282-20
  source 1..51: mol_type = other DNA
gcttattggtaccagcagaagccaggccagtcccctgtgttggtgatatat

SEQ ID NO: 1299 - DNA, 108 bp, synthetic construct
  misc_feature 1..108: note = Description of sequence: Sequence Name: 71281-1
  source 1..108: mol_type = other DNA
aagcgaccctcagggattcctgaccgattctctggctccaagtctggcacgtcagccaccctgggcatcaccgggctccagactggggacgaggccgatttttactgc

SEQ ID NO: 1300 - DNA, 108 bp, synthetic construct
  misc_feature 1..108: note = Description of sequence: Sequence Name: 71281-2
  source 1..108: mol_type = other DNA
acccgggaatccggggtccctgaccgattcagtggcagcgggtctgggacagatttcactctcaccatcagtagcctccaggctgaagatgtggcagtttattactgt

SEQ ID NO: 1301 - DNA, 108 bp, synthetic construct
  misc_feature 1..108: note = Description of sequence: Sequence Name: 71281-3
  source 1..108: mol_type = other DNA
aagcggccctcagggatccctgagcgattctctggctccaactctgggaacacagccactctgaccatcagcgggacccaggccatggatgaggctgactatttttgt

SEQ ID NO: 1302 - DNA, 108 bp, synthetic construct
  misc_feature 1..108: note = Description of sequence: Sequence Name: 71281-4
  source 1..108: mol_type = other DNA
tccagggccactggtatcccagccagattcagtggcagtgggtctgggacagagttcactctcaccatcagcagcctgcagtctgaagattttgcagtttattactgt

SEQ ID NO: 1303 - DNA, 108 bp, synthetic construct
  misc_feature 1..108: note = Description of sequence: Sequence Name: 71281-5
  source 1..108: mol_type = other DNA
aagcgaccctcagggattcctgaccgattctctggctccaagtctggcacgtcagccaccctgggcatcaccggactccagactggggacgaggccgattattactgc

SEQ ID NO: 1304 - DNA, 108 bp, synthetic construct
  misc_feature 1..108: note = Description of sequence: Sequence Name: 71281-6
  source 1..108: mol_type = other DNA
aatttggatacaggggtcccatcaaggttcagcggaagtggatctgggacagattttactttcaccatcagcagcctgcagcctgaagatgttgcaacatattactgt

SEQ ID NO: 1305 - DNA, 108 bp, synthetic construct
  misc_feature 1..108: note = Description of sequence: Sequence Name: 71281-7
  source 1..108: mol_type = other DNA
gagaggccctctgggattcctgagcgattctctggctccagctcagggactacagtcacgttgaccatcagtggagtccaggcagaagacgaggctgactattactgt

SEQ ID NO: 1306 - DNA, 108 bp, synthetic construct
  misc_feature 1..108: note = Description of sequence: Sequence Name: 71281-8
  source 1..108: mol_type = other DNA
agtttgcaaagtggggtcccatcaaggttcagtggcagtggatctgggacagatttcactctcaccatcagcagtctgcaacctgaagattttgcaacttactactgt

SEQ ID NO: 1307 - DNA, 108 bp, synthetic construct
  misc_feature 1..108: note = Description of sequence: Sequence Name: 71281-9
  source 1..108: mol_type = other DNA
aaacgaccctccgggatccctgagagattctctggctccagctcagggacaatggccaccttgactatcagtggggcccagatggaggatgaagctgactactactgt

SEQ ID NO: 1308 - DNA, 108 bp, synthetic construct
  misc_feature 1..108: note = Description of sequence: Sequence Name: 71281-10
  source 1..108: mol_type = other DNA
attcgggcctccggggtccctgacaggttcagtggcagtggatcaggcacagattttacactgaaaatcagcacagtggaggctgaggatgttggggtttattactgc

SEQ ID NO: 1309 - DNA, 108 bp, synthetic construct
  misc_feature 1..108: note = Description of sequence: Sequence Name: 71281-11
  source 1..108: mol_type = other DNA
aacagggccactggcatcccagacaggttcagtggtagtggatctgggacagacttcactctcaccatcagcagactggagcctgaggattttgcagtgtattactgt

SEQ ID NO: 1310 - DNA, 108 bp, synthetic construct
  misc_feature 1..108: note = Description of sequence: Sequence Name: 71281-12
  source 1..108: mol_type = other DNA
aaccggccctcagggatcccagaacgagtctctggctccagctcaggaaacacagcttccttgaccatcactggggctcaggcggaagatgaggctgactattactgt

SEQ ID NO: 1311 - DNA, 108 bp, synthetic construct
  misc_feature 1..108: note = Description of sequence: Sequence Name: 71281-13
  source 1..108: mol_type = other DNA
aaattggaaacaggggtcccatcaaggttcagtggaagtgcatctgggacagatttcactctcaccatcagcggcctgcagcctgaagatattgcaacatattactgt

SEQ ID NO: 1312 - DNA, 108 bp, synthetic construct
  misc_feature 1..108: note = Description of sequence: Sequence Name: 71281-14
  source 1..108: mol_type = other DNA
aacagggccactggcatcccagccaggttcagtggcagtgggtctgggacagacttcactctcaccatcagcagcctagagcctgaagattttgcagtttattactgt

SEQ ID NO: 1313 - DNA, 108 bp, synthetic construct
  misc_feature 1..108: note = Description of sequence: Sequence Name: 71281-15
  source 1..108: mol_type = other DNA
actttgcaaagtggggtcccaccaaggttcagcggcagtggatctgggacagatttcactctcacaatcagcagcctgcagcctgaagattttgcaacttattactgt

SEQ ID NO: 1314 - DNA, 108 bp, synthetic construct
  misc_feature 1..108: note = Description of sequence: Sequence Name: 71281-16
  source 1..108: mol_type = other DNA
accagggccactggcatcccagacaggttcagtggcagtgggtctgggacagacttcactctcaccatcagcagactggagcctgaagattttgccgtgtattactgt

SEQ ID NO: 1315 - DNA, 108 bp, synthetic construct
  misc_feature 1..108: note = Description of sequence: Sequence Name: 71281-17
  source 1..108: mol_type = other DNA
aacagggccactggcatcccagccaggttcagtggcagtgggtctgggacaggcttcactctcaccatcaacggcctagagcctgacgattttgcagtttattactgt

SEQ ID NO: 1316 - DNA, 108 bp, synthetic construct
  misc_feature 1..108: note = Description of sequence: Sequence Name: 71281-18
  source 1..108: mol_type = other DNA
aaccgggactctggggtcccagacaggttcagcggcagcgggtcaggcactgatttcacactgaaaatcagtagggtggaggctgaggatgctggcatttattactgc

SEQ ID NO: 1317 - DNA, 108 bp, synthetic construct
  misc_feature 1..108: note = Description of sequence: Sequence Name: 71281-19
  source 1..108: mol_type = other DNA
cagcggccctcaggggtccctgaccgattctctggctccaagtctggcacctcagcctccctggccatcagtgggctccggtccgaggatgaggctgattattactgt

SEQ ID NO: 1318 - DNA, 108 bp, synthetic construct
  misc_feature 1..108: note = Description of sequence: Sequence Name: 71281-20
  source 1..108: mol_type = other DNA
acgcgggaatccggggtccctgaccgattcagtggcagcgggtctgggacagatttcactctcaccatcagcagcctgcaggctgaagatgtggcagtttattactgt

SEQ ID NO: 1319 - DNA, 108 bp, synthetic construct; identical to SEQ ID NO: 1312
  misc_feature 1..108: note = Description of sequence: Sequence Name: 71281-21
  source 1..108: mol_type = other DNA

SEQ ID NO: 1320 - DNA, 108 bp, synthetic construct
  misc_feature 1..108: note = Description of sequence: Sequence Name: 71281-22
  source 1..108: mol_type = other DNA
cttcggccctcaggggtccctgaccgattctctggctccaagtctggcacctcagcctccctggccatcagtgggctccagtctgaggatgaggctgattattactgt

SEQ ID NO: 1321 - DNA, 108 bp, synthetic construct
  misc_feature 1..108: note = Description of sequence: Sequence Name: 71281-23
  source 1..108: mol_type = other DNA
aggagggccactggcatcccagacaggttcagtggcagtgggtctgggacagacttcactctcaccatcagcagactggagcctgaagattttgcagtgtattactgt

SEQ ID NO: 1322 - DNA, 108 bp, synthetic construct
  misc_feature 1..108: note = Description of sequence: Sequence Name: 71281-24
  source 1..108: mol_type = other DNA
acccgggaatccggggtccctgaccgattcagtggcagcgggtctgggacagatttcactctcaccatcagcagcctgcaggctgaagatgtggcagtttattactgt

SEQ ID NO: 1323 - DNA, 108 bp, synthetic construct
  misc_feature 1..108: note = Description of sequence: Sequence Name: 71281-25
  source 1..108: mol_type = other DNA
aaccgggactctggggtcccagacagattcaccggcagtgggtcaggcactgatttcacactgaaaatcagcagggtggaggctgaggatgttggggtttattactgc

SEQ ID NO: 1324 - DNA, 108 bp, synthetic construct
  misc_feature 1..108: note = Description of sequence: Sequence Name: 71281-26
  source 1..108: mol_type = other DNA
aagcggccctcaggggtttctgatcgcttctctggctccaagtctggcaacacggcctccctgaccatctctgggctccacactgaggacgaggctgattattactgc

SEQ ID NO: 1325 - DNA, 108 bp, synthetic construct
  misc_feature 1..108: note = Description of sequence: Sequence Name: 71281-27
  source 1..108: mol_type = other DNA
aagcgaccctcagggattcctgaccgattctctggctccaggtctggcacgtcagccaccctgggcatcaccggactccagactggggacgaggccgattattactgc

SEQ ID NO: 1326 - DNA, 108 bp, synthetic construct; identical to SEQ ID NO: 1322
  misc_feature 1..108: note = Description of sequence: Sequence Name: 71281-28
  source 1..108: mol_type = other DNA

SEQ ID NO: 1327 - DNA, 108 bp, synthetic construct
  misc_feature 1..108: note = Description of sequence: Sequence Name: 71281-29
  source 1..108: mol_type = other DNA
aatcggccctcaggggtccctgaccgattctctggctccaagtctggcacctcagcctccctggccatcactgggctccaggctgaggatgaggctgattattactgc

SEQ ID NO: 1328 - DNA, 108 bp, synthetic construct
  misc_feature 1..108: note = Description of sequence: Sequence Name: 71281-30
  source 1..108: mol_type = other DNA
aatttggagtcaggggtcccatcaaggttcagtggtagcggatctgggacatctttttctttcaccatcagcagcctgcagcctgaagatattgcaacatatttttgt

SEQ ID NO: 1329 - DNA, 108 bp, synthetic construct
  misc_feature 1..108: note = Description of sequence: Sequence Name: 71281-31
  source 1..108: mol_type = other DNA
gaccggccctcagggatccctgagcgattctctggctccaactcggggaacatggccaccctgaccatcagcagggtcgaagccggggatgaggccgactattactgt

SEQ ID NO: 1330 - DNA, 108 bp, synthetic construct
  misc_feature 1..108: note = Description of sequence: Sequence Name: 71281-32
  source 1..108: mol_type = other DNA
aatcggccctcaggggtttctaatcgcttctctggctccaagtctggcaacacggcctccctgaccatctctgggctccaggctgaggacgaggctgattattactgc

SEQ ID NO: 1331 - DNA, 108 bp, synthetic construct
  misc_feature 1..108: note = Description of sequence: Sequence Name: 71281-33
  source 1..108: mol_type = other DNA
agtttggaaagtggggtcccatcaaggttcagcggcagtggatctgggacagaattcactctcaccatcaccaccctgcagcctgatgatcttgcaacttattactgc

SEQ ID NO: 1332 - DNA, 108 bp, synthetic construct
  misc_feature 1..108: note = Description of sequence: Sequence Name: 71281-34
  source 1..108: mol_type = other DNA
actttgcaaagtggggtcccatcaaggttcggcggcagtggatctgggacagaattcactctcacaatcagcaacctgcagcctgaagattttggaactttttactgt

SEQ ID NO: 1333 - DNA, 108 bp, synthetic construct
  misc_feature 1..108: note = Description of sequence: Sequence Name: 71281-35
  source 1..108: mol_type = other DNA
aatttgggaacaggggtcccatcaaggttcagtggaagtggatctgggacagattttactttcaccatcagcagcctgcagcctgaagatattgcaacatattactgt

SEQ ID NO: 1334 - DNA, 108 bp, synthetic construct
  misc_feature 1..108: note = Description of sequence: Sequence Name: 71281-36
  source 1..108: mol_type = other DNA
cggagggccactgccatcccagacaggttcagtggcagtgggtctgggacagacttcactctcaacatcagcagactggagcctgaagatttcgcagtgtattcctgt

SEQ ID NO: 1335 - DNA, 108 bp, synthetic construct
  misc_feature 1..108: note = Description of sequence: Sequence Name: 71281-37
  source 1..108: mol_type = other DNA
aatttggaaacaggggtcccatcaaggttcaggggaactggatctgggacagattttactttcaccatcagcagcctgcagcctgaagatattgcaacatattactgt

SEQ ID NO: 1336 - DNA, 108 bp, synthetic construct
  misc_feature 1..108: note = Description of sequence: Sequence Name: 71281-38
  source 1..108: mol_type = other DNA
cagcggccctcaggggtccctgaccgattctctggctccaagtctgacacctcagcctccctggccatcagtgggctccagtctgaggatgaggctgattattactgt

SEQ ID NO: 1337 - DNA, 108 bp, synthetic construct
  misc_feature 1..108: note = Description of sequence: Sequence Name: 71281-39
  source 1..108: mol_type = other DNA
aatttgcaaggtggggtcccatcaaggttcagcggcagtggatctgggacagaattcactctcacaatcagcaggctgcagcctgaagattttgcaagttattactgt

SEQ ID NO: 1338 - DNA, 108 bp, synthetic construct; identical to SEQ ID NO: 1327
  misc_feature 1..108: note = Description of sequence: Sequence Name: 71282-1
  source 1..108: mol_type = other DNA

SEQ ID NO: 1339 - DNA, 108 bp, synthetic construct
  misc_feature 1..108: note = Description of sequence: Sequence Name: 71282-2
  source 1..108: mol_type = other DNA
aacagggccactggcaccccagccaggttcagtggcagtgggtctgggacagacttcactctcaccgtcagcagcctagagcctgaggattttgcagtttattactgt

SEQ ID NO: 1340 - DNA, 108 bp, synthetic construct; identical to SEQ ID NO: 1327
  misc_feature 1..108: note = Description of sequence: Sequence Name: 71282-3
  source 1..108: mol_type = other DNA

SEQ ID NO: 1341 - DNA, 108 bp, synthetic construct
  misc_feature 1..108: note = Description of sequence: Sequence Name: 71282-4
  source 1..108: mol_type = other DNA
aatttgcaaagtggggtcccatcaaggttcagcggcagggggtctggggcagaattcactctcacaatcagcagcctgcagcctgaagattttgcaacttattactgt

SEQ ID NO: 1342 - DNA, 108 bp, synthetic construct
  misc_feature 1..108: note = Description of sequence: Sequence Name: 71282-5
  source 1..108: mol_type = other DNA
gagaggccctcagggatccctgagcgattctctggctccggctcagggacaacactcacgttgaccatcagtagagtccaggcagaagacgaggctgactatttctgt

SEQ ID NO: 1343 - DNA, 108 bp, synthetic construct
  misc_feature 1..108: note = Description of sequence: Sequence Name: 71282-6
  source 1..108: mol_type = other DNA
ctgctgccctcaggggtctctgaccgattctctggctccaagtctggcacctcagcctccctggccatcagtgggctccagtctgaggatgaggctgattattactgt

SEQ ID NO: 1344 - DNA, 108 bp, synthetic construct
  misc_feature 1..108: note = Description of sequence: Sequence Name: 71282-7
  source 1..108: mol_type = other DNA
agcagggccactggcatcccagacaggttcagtggccgtgggtctgggacagacttcactctcaccgtcagcagactggagcctgaagattttgcagtgtattactgt

SEQ ID NO: 1345 - DNA, 108 bp, synthetic construct
  misc_feature 1..108: note = Description of sequence: Sequence Name: 71282-8
  source 1..108: mol_type = other DNA
agtttgcaaagtggggtcccatcaaggttcagtggaagtggatctgggacagatttcactctcaccatcagcagtctgcaacctgaagattttgcaacttactactgt

SEQ ID NO: 1346 - DNA, 108 bp, synthetic construct
  misc_feature 1..108: note = Description of sequence: Sequence Name: 71282-9
  source 1..108: mol_type = other DNA
tacagggccactggcatcccagacaggttcagtggcagtgtgtctgggacagacttcactctcaccatcagcagactggagcctgaagatttagcagtgtattactgt

SEQ ID NO: 1347 - DNA, 108 bp, synthetic construct
  misc_feature 1..108: note = Description of sequence: Sequence Name: 71282-10
  source 1..108: mol_type = other DNA
agcagggccactggcgtcccagacaggttcagtggcagtgggtctgggacagacttcactctcaccatcagcggactggagcctgaggattttgcagtgtattactgt

SEQ ID NO: 1348 - DNA, 108 bp, synthetic construct
  misc_feature 1..108: note = Description of sequence: Sequence Name: 71282-11
  source 1..108: mol_type = other DNA
accaagggggacgggatccctgatcgcttctcaggctccagctctggggctgcgcgctacctcaccatctccagcctccagtctgaggatgaggctgactattactgt

SEQ ID NO: 1349 - DNA, 108 bp, synthetic construct; identical to SEQ ID NO: 1306
  misc_feature 1..108: note = Description of sequence: Sequence Name: 71282-12
  source 1..108: mol_type = other DNA

SEQ ID NO: 1350 - DNA, 108 bp, synthetic construct
  misc_feature 1..108: note = Description of sequence: Sequence Name: 71282-13
  source 1..108: mol_type = other DNA
gaccggccctcagggatccctgagcgattttctggctccaagtctgcgaacacggccaccctgaccatcagcagggtcgaagccggggatgaggccgactaccactgt

SEQ ID NO: 1351 - DNA, 108 bp, synthetic construct
  misc_feature 1..108: note = Description of sequence: Sequence Name: 71282-14
  source 1..108: mol_type = other DNA
cagcggccctcaggggtccctgaccggttctctggctccaagtctggcacctcagcctccctggccatcagtgggctccggtccgaggatgaggctgattattactgt

SEQ ID NO: 1352 - DNA, 108 bp, synthetic construct
  misc_feature 1..108: note = Description of sequence: Sequence Name: 71282-15
  source 1..108: mol_type = other DNA
agtttgcaaagtggggtcacgtcaagattcagtggcagtggatttgggacagaattcactctcgctatcgacagtctgcaacctgaggattttgcaacttactactgt

SEQ ID NO: 1353 - DNA, 108 bp, synthetic construct
  misc_feature 1..108: note = Description of sequence: Sequence Name: 71282-16
  source 1..108: mol_type = other DNA
gagcggccctcagggatctctgaacgattctctgtctccgactctgggaacacagtcactctgaccatcagcgggacccagtctatggatgaggcggactattactgt

SEQ ID NO: 1354 - DNA, 108 bp, synthetic construct
  misc_feature 1..108: note = Description of sequence: Sequence Name: 71282-17
  source 1..108: mol_type = other DNA
agcagggccactgacatcccagacagattcagtggcagtgggtctgggacagacttcactctcaccatcagcagactggaccctgaagacttcgcagtgtattactgt

SEQ ID NO: 1355 - DNA, 108 bp, synthetic construct
  misc_feature 1..108: note = Description of sequence: Sequence Name: 71282-18
  source 1..108: mol_type = other DNA
aaccggttctctggagtgccagataggttcagtggcagcgggtcagggacagatttcacactgaaaatcagccgggtggaggctgaggatgttggggtttattactgc

SEQ ID NO: 1356 - DNA, 108 bp, synthetic construct
  misc_feature 1..108: note = Description of sequence: Sequence Name: 71282-19
  source 1..108: mol_type = other DNA
actttagaaagtggggtcccgtcaaggttcagcggcagtggctctgggacagaattcactctcactatcagcagtctgcagcctgatgattttgcaacttattactgc

SEQ ID NO: 1357 - DNA, 108 bp, synthetic construct
  misc_feature 1..108: note = Description of sequence: Sequence Name: 71282-20
  source 1..108: mol_type = other DNA
gagaggccctcagggatccctgagcgattctctggctccagctcagggacaacagtcacgttgaccatcagtggagtccaggcagaagacgaggctgactattactgt

SEQ ID NO: 1358 - DNA, 31 bp, synthetic construct
  misc_feature 1..31: note = Description of sequence: Sequence Name: 71281-1
  source 1..31: mol_type = other DNA
ttcggaactgggaccaaggtcaccgccctag

SEQ ID NO: 1359 - DNA, 31 bp, synthetic construct
  misc_feature 1..31: note = Description of sequence: Sequence Name: 71281-2
  source 1..31: mol_type = other DNA
ttcggcggagggaccagggtggagatcaaac

SEQ ID NO: 1360 - DNA, 31 bp, synthetic construct
  misc_feature 1..31: note = Description of sequence: Sequence Name: 71281-3
  source 1..31: mol_type = other DNA
ttcggcggagggaccaagctgaccgtcctac

SEQ ID NO: 1361 - DNA, 31 bp, synthetic construct
  misc_feature 1..31: note = Description of sequence: Sequence Name: 71281-4
  source 1..31: mol_type = other DNA
tttggccaggggaccaagttggagatcaaac

SEQ ID NO: 1362 - DNA, 31 bp, synthetic construct
  misc_feature 1..31: note = Description of sequence: Sequence Name: 71281-5
  source 1..31: mol_type = other DNA
ttcggcggagggaccaagctgaccgtcctag

SEQ ID NO: 1363 - DNA, 31 bp, synthetic construct
  misc_feature 1..31: note = Description of sequence: Sequence Name: 71281-6
  source 1..31: mol_type = other DNA
ttcggccctgggaccaaagtggatgtcaaac

SEQ ID NO: 1364 - DNA, 31 bp, synthetic construct
  misc_feature 1..31: note = Description of sequence: Sequence Name: 71281-7
  source 1..31: mol_type = other DNA
ttcggcggagggaccaagctgagcgtcctag

SEQ ID NO: 1365 - DNA, 31 bp, synthetic construct
  misc_feature 1..31: note = Description of sequence: Sequence Name: 71281-8
  source 1..31: mol_type = other DNA
ttcggcggagggacgaaggtggagatcaaag

SEQ ID NO: 1366 - DNA, 31 bp, synthetic construct
  misc_feature 1..31: note = Description of sequence: Sequence Name: 71281-9
  source 1..31: mol_type = other DNA
ttcggcggggggaccaagctgaccgtcctag

SEQ ID NO: 1367 - DNA, 31 bp, synthetic construct
  misc_feature 1..31: note = Description of sequence: Sequence Name: 71281-10
  source 1..31: mol_type = other DNA
ttcggccaagggaccaaggtggaactcaaac

SEQ ID NO: 1368 - DNA, 31 bp, synthetic construct
  misc_feature 1..31: note = Description of sequence: Sequence Name: 71281-11
  source 1..31: mol_type = other DNA
ttcggccaagggaccaaggtggaagtcaaac

SEQ ID NO: 1369 - DNA, 31 bp, synthetic construct
  misc_feature 1..31: note = Description of sequence: Sequence Name: 71281-12
  source 1..31: mol_type = other DNA
ttcggcggagggaccaagttgaccgtcctag

SEQ ID NO: 1370 - DNA, 31 bp, synthetic construct
  misc_feature 1..31: note = Description of sequence: Sequence Name: 71281-13
  source 1..31: mol_type = other DNA
ttcggccaagggacacgactggagattaagc

SEQ ID NO: 1371 - DNA, 31 bp, synthetic construct
  misc_feature 1..31: note = Description of sequence: Sequence Name: 71281-14
  source 1..31: mol_type = other DNA
ttcggccaagggacacgactggagattaaac

SEQ ID NO: 1372 - DNA, 31 bp, synthetic construct; identical to SEQ ID NO: 1371
  misc_feature 1..31: note = Description of sequence: Sequence Name: 71281-15
  source 1..31: mol_type = other DNA

SEQ ID NO: 1373 - DNA, 31 bp, synthetic construct
  misc_feature 1..31: note = Description of sequence: Sequence Name: 71281-16
  source 1..31: mol_type = other DNA
ttcggccaagggaccaaggtggaaatcaaac

SEQ ID NO: 1374 - DNA, 31 bp, synthetic construct
  misc_feature 1..31: note = Description of sequence: Sequence Name: 71281-17
  source 1..31: mol_type = other DNA
tttggccaggggaccaagctggagatcaaac

SEQ ID NO: 1375 - DNA, 31 bp, synthetic construct
  misc_feature 1..31: note = Description of sequence: Sequence Name: 71281-18
  source 1..31: mol_type = other DNA
ttcggcccagggaccaaggtggaaatcaacc

SEQ ID NO: 1376 - DNA, 31 bp, synthetic construct; identical to SEQ ID NO: 1362
  misc_feature 1..31: note = Description of sequence: Sequence Name: 71281-19
  source 1..31: mol_type = other DNA

SEQ ID NO: 1377 - DNA, 31 bp, synthetic construct
  misc_feature 1..31: note = Description of sequence: Sequence Name: 71281-20
  source 1..31: mol_type = other DNA
ttcggccaagggaccaaggtggaaataaaac

SEQ ID NO: 1378 - DNA, 31 bp, synthetic construct
  misc_feature 1..31: note = Description of sequence: Sequence Name: 71281-21
  source 1..31: mol_type = other DNA
ttcggccgagggacacgactggagattaaac

SEQ ID NO: 1379 - DNA, 31 bp, synthetic construct
  misc_feature 1..31: note = Description of sequence: Sequence Name: 71281-22
  source 1..31: mol_type = other DNA
ttcggaactgggaccaaggtcaccgtcctag

SEQ ID NO: 1380 - DNA, 31 bp, synthetic construct; identical to SEQ ID NO: 1373
  misc_feature 1..31: note = Description of sequence: Sequence Name: 71281-23
  source 1..31: mol_type = other DNA

SEQ ID NO: 1381 - DNA, 31 bp, synthetic construct; identical to SEQ ID NO: 1373
  misc_feature 1..31: note = Description of sequence: Sequence Name: 71281-24
  source 1..31: mol_type = other DNA

SEQ ID NO: 1382 - DNA, 31 bp, synthetic construct; identical to SEQ ID NO: 1374
  misc_feature 1..31: note = Description of sequence: Sequence Name: 71281-25
  source 1..31: mol_type = other DNA

SEQ ID NO: 1383 - DNA, 31 bp, synthetic construct; identical to SEQ ID NO: 1362
  misc_feature 1..31: note = Description of sequence: Sequence Name: 71281-26
  source 1..31: mol_type = other DNA

SEQ ID NO: 1384 - DNA, 31 bp, synthetic construct; identical to SEQ ID NO: 1362
  misc_feature 1..31: note = Description of sequence: Sequence Name: 71281-27
  source 1..31: mol_type = other DNA

SEQ ID NO: 1385 - DNA, 31 bp, synthetic construct
  misc_feature 1..31: note = Description of sequence: Sequence Name: 71281-28
  source 1..31: mol_type = other DNA
ttcggcggagggaccaaggtggagatcaaac

SEQ ID NO: 1386 - DNA, 31 bp, synthetic construct; identical to SEQ ID NO: 1362
  misc_feature 1..31: note = Description of sequence: Sequence Name: 71281-29
  source 1..31: mol_type = other DNA

SEQ ID NO: 1387 - DNA, 31 bp, synthetic construct
  misc_feature 1..31: note = Description of sequence: Sequence Name: 71281-30
  source 1..31: mol_type = other DNA
ttcggcggagggaccaaggtgcagatcaaac

SEQ ID NO: 1388 - DNA, 31 bp, synthetic construct; identical to SEQ ID NO: 1362
  misc_feature 1..31: note = Description of sequence: Sequence Name: 71281-31
  source 1..31: mol_type = other DNA

SEQ ID NO: 1389 - DNA, 31 bp, synthetic construct; identical to SEQ ID NO: 1362
  misc_feature 1..31: note = Description of sequence: Sequence Name: 71281-32
  source 1..31: mol_type = other DNA

SEQ ID NO: 1390 - DNA, 31 bp, synthetic construct; identical to SEQ ID NO: 1374
  misc_feature 1..31: note = Description of sequence: Sequence Name: 71281-33
  source 1..31: mol_type = other DNA

SEQ ID NO: 1391 - DNA, 31 bp, synthetic construct; identical to SEQ ID NO: 1373
  misc_feature 1..31: note = Description of sequence: Sequence Name: 71281-34
  source 1..31: mol_type = other DNA

SEQ ID NO: 1392 - DNA, 31 bp, synthetic construct; identical to SEQ ID NO: 1374
  misc_feature 1..31: note = Description of sequence: Sequence Name: 71281-35
  source 1..31: mol_type = other DNA

SEQ ID NO: 1393 - DNA, 31 bp, synthetic construct
  misc_feature 1..31: note = Description of sequence: Sequence Name: 71281-36
  source 1..31: mol_type = other DNA
tttggccaggggaccaagctggagatcagac

SEQ ID NO: 1394 - DNA, 31 bp, synthetic construct
  misc_feature 1..31: note = Description of sequence: Sequence Name: 71281-37
  source 1..31: mol_type = other DNA
ttcggccaagggacacgactggagattagac

SEQ ID NO: 1395 - DNA, 31 bp, synthetic construct
  misc_feature 1..31: note = Description of sequence: Sequence Name: 71281-38
  source 1..31: mol_type = other DNA
ttcggcggagggaccaggctgaccgtcctag

SEQ ID NO: 1396 - DNA, 31 bp, synthetic construct
  misc_feature 1..31: note = Description of sequence: Sequence Name: 71281-39
  source 1..31: mol_type = other DNA
tttggccaggggaccaagctggagatcaagc

SEQ ID NO: 1397 - DNA, 31 bp, synthetic construct
  misc_feature 1..31: note = Description of sequence: Sequence Name: 71282-1
  source 1..31: mol_type = other DNA
ttcggcggagggaccaaactgaccgtcctag

SEQ ID NO: 1398 - DNA, 31 bp, synthetic construct
  misc_feature 1..31: note = Description of sequence: Sequence Name: 71282-2
  source 1..31: mol_type = other DNA
tttggccaggggaccaggttagagatcaaac

SEQ ID NO: 1399 - DNA, 31 bp, synthetic construct; identical to SEQ ID NO: 1366
  misc_feature 1..31: note = Description of sequence: Sequence Name: 71282-3
  source 1..31: mol_type = other DNA

SEQ ID NO: 1400 - DNA, 31 bp, synthetic construct
  misc_feature 1..31: note = Description of sequence: Sequence Name: 71282-4
  source 1..31: mol_type = other DNA
ttcggccaagggaccaaggtggcattcaaac

SEQ ID NO: 1401 - DNA, 31 bp, synthetic construct; identical to SEQ ID NO: 1397
  misc_feature 1..31: note = Description of sequence: Sequence Name: 71282-5
  source 1..31: mol_type = other DNA

SEQ ID NO: 1402 - DNA, 31 bp, synthetic construct; identical to SEQ ID NO: 1362
  misc_feature 1..31: note = Description of sequence: Sequence Name: 71282-6
  source 1..31: mol_type = other DNA

SEQ ID NO: 1403 - DNA, 31 bp, synthetic construct
  misc_feature 1..31: note = Description of sequence: Sequence Name: 71282-7
  source 1..31: mol_type = other DNA
ttcggccctgggaccaaagtggagatcaaag

SEQ ID NO: 1404 - DNA, 31 bp, synthetic construct; identical to SEQ ID NO: 1374
  misc_feature 1..31: note = Description of sequence: Sequence Name: 71282-8
  source 1..31: mol_type = other DNA

SEQ ID NO: 1405 - DNA, 31 bp, synthetic construct; identical to SEQ ID NO: 1374
  misc_feature 1..31: note = Description of sequence: Sequence Name: 71282-9
  source 1..31: mol_type = other DNA

SEQ ID NO: 1406 - DNA, 31 bp, synthetic construct; identical to SEQ ID NO: 1374
  misc_feature 1..31: note = Description of sequence: Sequence Name: 71282-10
  source 1..31: mol_type = other DNA

SEQ ID NO: 1407 - DNA, 31 bp, synthetic construct; identical to SEQ ID NO: 1362
  misc_feature 1..31: note = Description of sequence: Sequence Name: 71282-11
  source 1..31: mol_type = other DNA

SEQ ID NO: 1408 - DNA, 31 bp, synthetic construct; identical to SEQ ID NO: 1373
  misc_feature 1..31: note = Description of sequence: Sequence Name: 71282-12
  source 1..31: mol_type = other DNA

SEQ ID NO: 1409 - DNA, 31 bp, synthetic construct
  misc_feature 1..31: note = Description of sequence: Sequence Name: 71282-13
  source 1..31: mol_type = other DNA
ttcgcaggtgggacccaggtcaccgtcctag

SEQ ID NO: 1410 - DNA, 31 bp, synthetic construct; identical to SEQ ID NO: 1379
  misc_feature 1..31: note = Description of sequence: Sequence Name: 71282-14
  source 1..31: mol_type = other DNA

SEQ ID NO: 1411 - DNA, 31 bp, synthetic construct
  misc_feature 1..31: note = Description of sequence: Sequence Name: 71282-15
  source 1..31: mol_type = other DNA
ttcggcggagggaccagggtggagatcagac

SEQ ID NO: 1412 - DNA, 31 bp, synthetic construct
  misc_feature 1..31: note = Description of sequence: Sequence Name: 71282-16
  source 1..31: mol_type = other DNA
ttcggcggggggaccaagctgaccgtcctaa

SEQ ID NO: 1413 - DNA, 31 bp, synthetic construct
  misc_feature 1..31: note = Description of sequence: Sequence Name: 71282-17
  source 1..31: mol_type = other DNA
tttggccaggggaccaagctggaagtcaaac

SEQ ID NO: 1414 - DNA, 31 bp, synthetic construct; identical to SEQ ID NO: 1374
  misc_feature 1..31: note = Description of sequence: Sequence Name: 71282-18
  source 1..31: mol_type = other DNA

SEQ ID NO: 1415 - DNA, 31 bp, synthetic construct; identical to SEQ ID NO: 1393
  misc_feature 1..31: note = Description of sequence: Sequence Name: 71282-19
  source 1..31: mol_type = other DNA

SEQ ID NO: 1416 - DNA, 31 bp, synthetic construct; identical to SEQ ID NO: 1395
  misc_feature 1..31: note = Description of sequence: Sequence Name: 71282-20
  source 1..31: mol_type = other DNA

SEQ ID NO: 1417 - DNA, 24 bp, synthetic construct
  misc_feature 1..24: note = Description of sequence: Sequence Name: 71281-1
  source 1..24: mol_type = other DNA
agctccaacattggcaataattat

SEQ ID NO: 1418 - DNA, 36 bp, synthetic construct
  misc_feature 1..36: note = Description of sequence: Sequence Name: 71281-2
  source 1..36: mol_type = other DNA
cagagtgttttctacagctccaccaataacagctac

SEQ ID NO: 1419 - DNA, 18 bp, synthetic construct
  misc_feature 1..18: note = Description of sequence: Sequence Name: 71281-3
  source 1..18: mol_type = other DNA
aaattgggggataagttt

SEQ ID NO: 1420 - DNA, 18 bp, synthetic construct
  misc_feature 1..18: note = Description of sequence: Sequence Name: 71281-4
  source 1..18: mol_type = other DNA
cagagtgttagcagcaac

SEQ ID NO: 1421 - DNA, 24 bp, synthetic construct
  misc_feature 1..24: note = Description of sequence: Sequence Name: 71281-5
  source 1..24: mol_type = other DNA
agctccaacattgagaagaattat

SEQ ID NO: 1422 - DNA, 18 bp, synthetic construct
  misc_feature 1..18: note = Description of sequence: Sequence Name: 71281-6
  source 1..18: mol_type = other DNA
caggacattaacaattat

SEQ ID NO: 1423 - DNA, 18 bp, synthetic construct
  misc_feature 1..18: note = Description of sequence: Sequence Name: 71281-7
  source 1..18: mol_type = other DNA
aatttgccaaagcagtat

SEQ ID NO: 1424 - DNA, 18 bp, synthetic construct
  misc_feature 1..18: note = Description of sequence: Sequence Name: 71281-8
  source 1..18: mol_type = other DNA
cagagcattgccaggttt

SEQ ID NO: 1425 - DNA, 18 bp, synthetic construct
  misc_feature 1..18: note = Description of sequence: Sequence Name: 71281-9
  source 1..18: mol_type = other DNA
gcattgccaaaaaaatat

SEQ ID NO: 1426 - DNA, 33 bp, synthetic construct
  misc_feature 1..33: note = Description of sequence: Sequence Name: 71281-10
  source 1..33: mol_type = other DNA
cagagcctcctgcgtagtaatggaaagaaccat

SEQ ID NO: 1427 - DNA, 18 bp, synthetic construct
  misc_feature 1..18: note = Description of sequence: Sequence Name: 71281-11
  source 1..18: mol_type = other DNA
cagagtgttagtagctac

SEQ ID NO: 1428 - DNA, 18 bp, synthetic construct
  misc_feature 1..18: note = Description of sequence: Sequence Name: 71281-12
  source 1..18: mol_type = other DNA
agcctcagatattattat

SEQ ID NO: 1429 - DNA, 18 bp, synthetic construct
  misc_feature 1..18: note = Description of sequence: Sequence Name: 71281-13
  source 1..18: mol_type = other DNA
caggacatcaactactat

SEQ ID NO: 1430 - DNA, 18 bp, synthetic construct
  misc_feature 1..18: note = Description of sequence: Sequence Name: 71281-14
  source 1..18: mol_type = other DNA
cagagtgttaggacccac

SEQ ID NO: 1431 - DNA, 18 bp, synthetic construct
  misc_feature 1..18: note = Description of sequence: Sequence Name: 71281-15
  source 1..18: mol_type = other DNA
caggccatcagcacttat

SEQ ID NO: 1432 - DNA, 21 bp, synthetic construct
  misc_feature 1..21: note = Description of sequence: Sequence Name: 71281-16
  source 1..21: mol_type = other DNA
cagagtgttagcagcagctac

SEQ ID NO: 1433 - DNA, 18 bp, synthetic construct
  misc_feature 1..18: note = Description of sequence: Sequence Name: 71281-17
  source 1..18: mol_type = other DNA
cagagtgttagcagctac

SEQ ID NO: 1434 - DNA, 33 bp, synthetic construct
  misc_feature 1..33: note = Description of sequence: Sequence Name: 71281-18
  source 1..33: mol_type = other DNA
caaagcctcgtatacggtgatggaaatactttc

SEQ ID NO: 1435 - DNA, 24 bp, synthetic construct
  misc_feature 1..24: note = Description of sequence: Sequence Name: 71281-19
  source 1..24: mol_type = other DNA
aactccaacatcggaagtaattat

SEQ ID NO: 1436 - DNA, 36 bp, synthetic construct
  misc_feature 1..36: note = Description of sequence: Sequence Name: 71281-20
  source 1..36: mol_type = other DNA
cagagtgttttaaacagctccaacaataagaactac

SEQ ID NO: 1437 - DNA, 18 bp, synthetic construct
  misc_feature 1..18: note = Description of sequence: Sequence Name: 71281-21
  source 1..18: mol_type = other DNA
cagagtgttagcagctac

SEQ ID NO: 1438 - DNA, 24 bp, synthetic construct
  misc_feature 1..24: note = Description of sequence: Sequence Name: 71281-22
  source 1..24: mol_type = other DNA
agctccaacatcggaagtaatact

SEQ ID NO: 1439 - DNA, 21 bp, synthetic construct
  misc_feature 1..21: note = Description of sequence: Sequence Name: 71281-23
  source 1..21: mol_type = other DNA
cagagtgttagtaacaacaat

SEQ ID NO: 1440 - DNA, 36 bp, synthetic construct
  misc_feature 1..36: note = Description of sequence: Sequence Name: 71281-24
  source 1..36: mol_type = other DNA
cagagtgttttatacagctccaacaataagaactac

SEQ ID NO: 1441 - DNA, 33 bp, synthetic construct
  misc_feature 1..33: note = Description of sequence: Sequence Name: 71281-25
  source 1..33: mol_type = other DNA
caaagcctcgtatacagtgatggaaacacctac

SEQ ID NO: 1442 - DNA, 27 bp, synthetic construct
  misc_feature 1..27: note = Description of sequence: Sequence Name: 71281-26
  source 1..27: mol_type = other DNA
agcagtgacgttggtgcttataactat

SEQ ID NO: 1443 - DNA, 24 bp, synthetic construct
  misc_feature 1..24: note = Description of sequence: Sequence Name: 71281-27
  source 1..24: mol_type = other DNA
agctccaacattggcaataattat

SEQ ID NO: 1444 - DNA, 36 bp, synthetic construct; identical to SEQ ID NO: 1440
  misc_feature 1..36: note = Description of sequence: Sequence Name: 71281-28
  source 1..36: mol_type = other DNA

SEQ ID NO: 1445 - DNA, 27 bp, synthetic construct
  misc_feature 1..27: note = Description of sequence: Sequence Name: 71281-29
  source 1..27: mol_type = other DNA
agctccaacatcggggcaggttatgat

SEQ ID NO: 1446 - DNA, 18 bp, synthetic construct
  misc_feature 1..18: note = Description of sequence: Sequence Name: 71281-30
  source 1..18: mol_type = other DNA
cagcacattggtacgttt

SEQ ID NO: 1447 - DNA, 18 bp, synthetic construct
  misc_feature 1..18: note = Description of sequence: Sequence Name: 71281-31
  source 1..18: mol_type = other DNA
aatattgaaagtaaaagt

SEQ ID NO: 1448 - DNA, 27 bp, synthetic construct
  misc_feature 1..27: note = Description of sequence: Sequence Name: 71281-32
  source 1..27: mol_type = other DNA
agcagtgacgttggtgcttataactat

SEQ ID NO: 1449 - DNA, 18 bp, synthetic construct
  misc_feature 1..18: note = Description of sequence: Sequence Name: 71281-33
  source 1..18: mol_type = other DNA
cagggtattagtacgttc

SEQ ID NO: 1450 - DNA, 18 bp, synthetic construct
  misc_feature 1..18: note = Description of sequence: Sequence Name: 71281-34
  source 1..18: mol_type = other DNA
cagggcattgctggttat

SEQ ID NO: 1451 - DNA, 18 bp, synthetic construct
  misc_feature 1..18: note = Description of sequence: Sequence Name: 71281-35
  source 1..18: mol_type = other DNA
caggacattagcaagtat

SEQ ID NO: 1452 - DNA, 21 bp, synthetic construct
  misc_feature 1..21: note = Description of sequence: Sequence Name: 71281-36
  source 1..21: mol_type = other DNA
cagagtgttaggagcgactac

SEQ ID NO: 1453 - DNA, 18 bp, synthetic construct
  misc_feature 1..18: note = Description of sequence: Sequence Name: 71281-37
  source 1..18: mol_type = other DNA
caggacattagaaacttt

SEQ ID NO: 1454 - DNA, 24 bp, synthetic construct
  misc_feature 1..24: note = Description of sequence: Sequence Name: 71281-38
  source 1..24: mol_type = other DNA
agctccaacatcggaagtaatact

SEQ ID NO: 1455 - DNA, 18 bp, synthetic construct
  misc_feature 1..18: note = Description of sequence: Sequence Name: 71281-39
  source 1..18: mol_type = other DNA
caagacattagagatgat

SEQ ID NO: 1456 - DNA, 27 bp, synthetic construct
  misc_feature 1..27: note = Description of sequence: Sequence Name: 71282-1
  source 1..27: mol_type = other DNA
agctccaacatcggggcaggttatgat

SEQ ID NO: 1457 - DNA, 18 bp, synthetic construct
  misc_feature 1..18: note = Description of sequence: Sequence Name: 71282-2
  source 1..18: mol_type = other DNA
cagagtgttagcagctac

SEQ ID NO: 1458 - DNA, 27 bp, synthetic construct
  misc_feature 1..27: note = Description of sequence: Sequence Name: 71282-3
  source 1..27: mol_type = other DNA
aactccaacatcggggcaggttatgat

SEQ ID NO: 1459 - DNA, 18 bp, synthetic construct
  misc_feature 1..18: note = Description of sequence: Sequence Name: 71282-4
  source 1..18: mol_type = other DNA
caggacattaacatttat

SEQ ID NO: 1460 - DNA, 18 bp, synthetic construct
  misc_feature 1..18: note = Description of sequence: Sequence Name: 71282-5
  source 1..18: mol_type = other DNA
gcattgccaatgcaatat

SEQ ID NO: 1461 - DNA, 24 bp, synthetic construct
  misc_feature 1..24: note = Description of sequence: Sequence Name: 71282-6
  source 1..24: mol_type = other DNA
agctccaacatcggaaataatgct

SEQ ID NO: 1462 - DNA, 21 bp, synthetic construct
  misc_feature 1..21: note = Description of sequence: Sequence Name: 71282-7
  source 1..21: mol_type = other DNA
cagagtgttagcagcagctac

SEQ ID NO: 1463 - DNA, 18 bp, synthetic construct
  misc_feature 1..18: note = Description of sequence: Sequence Name: 71282-8
  source 1..18: mol_type = other DNA
cagagcattaacacctat

SEQ ID NO: 1464 - DNA, 21 bp, synthetic construct
  misc_feature 1..21: note = Description of sequence: Sequence Name: 71282-9
  source 1..21: mol_type = other DNA
caatattttagcagcagtcac

SEQ ID NO: 1465 - DNA, 21 bp, synthetic construct
  misc_feature 1..21: note = Description of sequence: Sequence Name: 71282-10
  source 1..21: mol_type = other DNA
cagggtgttagcagcaactac

SEQ ID NO: 1466 - DNA, 21 bp, synthetic construct
  misc_feature 1..21: note = Description of sequence: Sequence Name: 71282-11
  source 1..21: mol_type = other DNA
agtgggcacagcagctacgcc

SEQ ID NO: 1467 - DNA, 18 bp, synthetic construct
  misc_feature 1..18: note = Description of sequence: Sequence Name: 71282-12
  source 1..18: mol_type = other DNA
cagagcattagcagctat

SEQ ID NO: 1468 - DNA, 18 bp, synthetic construct
  misc_feature 1..18: note = Description of sequence: Sequence Name: 71282-13
  source 1..18: mol_type = other DNA
aacattggaagtaaaagc

SEQ ID NO: 1469 - DNA, 24 bp, synthetic construct
  misc_feature 1..24: note = Description of sequence: Sequence Name: 71282-14
  source 1..24: mol_type = other DNA
agctccaacatcgaaagtaattat

SEQ ID NO: 1470 - DNA, 18 bp, synthetic construct
  misc_feature 1..18: note = Description of sequence: Sequence Name: 71282-15
  source 1..18: mol_type = other DNA
cagagcattaatgcctat

SEQ ID NO: 1471 - DNA, 18 bp, synthetic construct
  misc_feature 1..18: note = Description of sequence: Sequence Name: 71282-16
  source 1..18: mol_type = other DNA
aaattggacaataaatat

SEQ ID NO: 1472 - DNA, 21 bp, synthetic construct
  misc_feature 1..21: note = Description of sequence: Sequence Name: 71282-17
  source 1..21: mol_type = other DNA
caggctgttagtagaagtaag

SEQ ID NO: 1473 - DNA, 33 bp, synthetic construct
  misc_feature 1..33: note = Description of sequence: Sequence Name: 71282-18
  source 1..33: mol_type = other DNA
cagagcctcctgcatagtgatggaaagacctat

SEQ ID NO: 1474 - DNA, 18 bp, synthetic construct
  misc_feature 1..18: note = Description of sequence: Sequence Name: 71282-19
  source 1..18: mol_type = other DNA
cagagtattagtcagtgg

SEQ ID NO: 1475 - DNA, 18 bp, synthetic construct
  misc_feature 1..18: note = Description of sequence: Sequence Name: 71282-20
  source 1..18: mol_type = other DNA
gcatggccaaagcaatat

SEQ ID NO: 1476-1524 - skipped (49 entries)

SEQ ID NO: 1525 - DNA, 21 bp, synthetic construct
  misc_feature 1..21: note = Description of sequence: Sequence Name: DELETE
  source 1..21: mol_type = other DNA
cttaacagtgatggcagccac

SEQ ID NO: 1526-1534 - skipped (9 entries)

SEQ ID NO: 1535 - DNA, 33 bp, synthetic construct
  misc_feature 1..33: note = Description of sequence: Sequence Name: 71281-1
  source 1..33: mol_type = other DNA
ggaacatgggatagcagcctgagtgcttttgtc

SEQ ID NO: 1536 - DNA, 27 bp, synthetic construct
  misc_feature 1..27: note = Description of sequence: Sequence Name: 71281-2
  source 1..27: mol_type = other DNA
caacaatattataacactcccctcact

SEQ ID NO: 1537 - DNA, 27 bp, synthetic construct
  misc_feature 1..27: note = Description of sequence: Sequence Name: 71281-3
  source 1..27: mol_type = other DNA
caggcgtgggctagtagcactgcgata

SEQ ID NO: 1538 - DNA, 30 bp, synthetic construct
  misc_feature 1..30: note = Description of sequence: Sequence Name: 71281-4
  source 1..30: mol_type = other DNA
cagcagtataataactggccttcgtacact

SEQ ID NO: 1539 - DNA, 33 bp, synthetic construct
  misc_feature 1..33: note = Description of sequence: Sequence Name: 71281-5
  source 1..33: mol_type = other DNA
ggaacatgggatagcagcctgagagctgtggta

SEQ ID NO: 1540 - DNA, 27 bp, synthetic construct
  misc_feature 1..27: note = Description of sequence: Sequence Name: 71281-6
  source 1..27: mol_type = other DNA
caacagtatgagaatctgatattcact

SEQ ID NO: 1541 - DNA, 33 bp, synthetic construct
  misc_feature 1..33: note = Description of sequence: Sequence Name: 71281-7
  source 1..33: mol_type = other DNA
cagtcagcagacaccggtggaacttttgtggtc

SEQ ID NO: 1542 - DNA, 30 bp, synthetic construct
  misc_feature 1..30: note = Description of sequence: Sequence Name: 71281-8
  source 1..30: mol_type = other DNA
caacagagttacagtgtccctccgctcact

SEQ ID NO: 1543 - DNA, 33 bp, synthetic construct
  misc_feature 1..33: note = Description of sequence: Sequence Name: 71281-9
  source 1..33: mol_type = other DNA
tactcaacagacagcactggtaatcatagggtg

SEQ ID NO: 1544 - DNA, 27 bp, synthetic construct
  misc_feature 1..27: note = Description of sequence: Sequence Name: 71281-10
  source 1..27: mol_type = other DNA
atgcaagctctacaaattccgtggacg

SEQ ID NO: 1545 - DNA, 27 bp, synthetic construct
  misc_feature 1..27: note = Description of sequence: Sequence Name: 71281-11
  source 1..27: mol_type = other DNA
cagcagtgtggtagttcacctcggacg

SEQ ID NO: 1546 - DNA, 33 bp, synthetic construct
  misc_feature 1..33: note = Description of sequence: Sequence Name: 71281-12
  source 1..33: mol_type = other DNA
aattcccgggacagcagtggtaaccattgggtg

SEQ ID NO: 1547 - DNA, 30 bp, synthetic construct
  misc_feature 1..30: note = Description of sequence: Sequence Name: 71281-13
  source 1..30: mol_type = other DNA
caacagtatgataattcccctcggatcacc

SEQ ID NO: 1548 - DNA, 27 bp, synthetic construct
  misc_feature 1..27: note = Description of sequence: Sequence Name: 71281-14
  source 1..27: mol_type = other DNA
cagcagcgtaacaagtggcccatcacc

SEQ ID NO: 1549 - DNA, 30 bp, synthetic construct
  misc_feature 1..30: note = Description of sequence: Sequence Name: 71281-15
  source 1..30: mol_type = other DNA
cagcaacttgatcgttaccctccgttcacc

SEQ ID NO: 1550 - DNA, 30 bp, synthetic construct
  misc_feature 1..30: note = Description of sequence: Sequence Name: 71281-16
  source 1..30: mol_type = other DNA
cagcactatggtagctcacctccgaggacg

SEQ ID NO: 1551 - DNA, 27 bp, synthetic construct
  misc_feature 1..27: note = Description of sequence: Sequence Name: 71281-17
  source 1..27: mol_type = other DNA
cagcagcgtcggagctggccgtacact

SEQ ID NO: 1552 - DNA, 24 bp, synthetic construct
  misc_feature 1..24: note = Description of sequence: Sequence Name: 71281-18
  source 1..24: mol_type = other DNA
atgcagggtacaaattggtggacg

SEQ ID NO: 1553 - DNA, 33 bp, synthetic construct
  misc_feature 1..33: note = Description of sequence: Sequence Name: 71281-19
  source 1..33: mol_type = other DNA
gcagcatgggatgacagcctgagtggtccggtt

SEQ ID NO: 1554 - DNA, 24 bp, synthetic construct
  misc_feature 1..24: note = Description of sequence: Sequence Name: 71281-20
  source 1..24: mol_type = other DNA
cagcaatattatactactccggag

SEQ ID NO: 1555 - DNA, 30 bp, synthetic construct
  misc_feature 1..30: note = Description of sequence: Sequence Name: 71281-21
  source 1..30: mol_type = other DNA
cagcaacgtggcaactggcccccgatcacc

SEQ ID NO: 1556 - DNA, 36 bp, synthetic construct
  misc_feature 1..36: note = Description of sequence: Sequence Name: 71281-22
  source 1..36: mol_type = other DNA
gcaacatgggatgacagcctgagtggtctttatgtc

SEQ ID NO: 1557 - DNA, 27 bp, synthetic construct
  misc_feature 1..27: note = Description of sequence: Sequence Name: 71281-23
  source 1..27: mol_type = other DNA
cagcactatgataactcagtctggacg

SEQ ID NO: 1558 - DNA, 27 bp, synthetic construct
  misc_feature 1..27: note = Description of sequence: Sequence Name: 71281-24
  source 1..27: mol_type = other DNA
cagcaatattatagtgctccgtggacg

SEQ ID NO: 1559 - DNA, 27 bp, synthetic construct
  misc_feature 1..27: note = Description of sequence: Sequence Name: 71281-25
  source 1..27: mol_type = other DNA
atgcaaggtacgcagtggccgtggact

SEQ ID NO: 1560 - DNA, 30 bp, synthetic construct
  misc_feature 1..30: note = Description of sequence: Sequence Name: 71281-26
  source 1..30: mol_type = other DNA
tactcacttacgaccaccaccacttgggtg

SEQ ID NO: 1561 - DNA, 33 bp, synthetic construct
  misc_feature 1..33: note = Description of sequence: Sequence Name: 71281-27
  source 1..33: mol_type = other DNA
ggaacatgggatagcagcctgagtactgaagtg

SEQ ID NO: 1562 - DNA, 27 bp, synthetic construct
  misc_feature 1..27: note = Description of sequence: Sequence Name: 71281-28
  source 1..27: mol_type = other DNA
cagcaacattatagtactcctgttact

SEQ ID NO: 1563 - DNA, 33 bp, synthetic construct
  misc_feature 1..33: note = Description of sequence: Sequence Name: 71281-29
  source 1..33: mol_type = other DNA
cagtcctatgacagcagcctgagtggttgggtg

SEQ ID NO: 1564 - DNA, 27 bp, synthetic construct
  misc_feature 1..27: note = Description of sequence: Sequence Name: 71281-30
  source 1..27: mol_type = other DNA
caacaatatgatgatttcccggtcact

SEQ ID NO: 1565 - DNA, 33 bp, synthetic construct
  misc_feature 1..33: note = Description of sequence: Sequence Name: 71281-31
  source 1..33: mol_type = other DNA
caggtgtgggagagtagtagtgatcatgtgata

SEQ ID NO: 1566 - DNA, 27 bp, synthetic construct
  misc_feature 1..27: note = Description of sequence: Sequence Name: 71281-32
  source 1..27: mol_type = other DNA
agctcatatacaaccagcagcgtggtt

SEQ ID NO: 1567 - DNA, 21 bp, synthetic construct
  misc_feature 1..21: note = Description of sequence: Sequence Name: 71281-33
  source 1..21: mol_type = other DNA
caacagtataatacgtacact

SEQ ID NO: 1568 - DNA, 27 bp, synthetic construct
  misc_feature 1..27: note = Description of sequence: Sequence Name: 71281-34
  source 1..27: mol_type = other DNA
caacaggttaatagttatcctcggacg

SEQ ID NO: 1569 - DNA, 27 bp, synthetic construct
  misc_feature 1..27: note = Description of sequence: Sequence Name: 71281-35
  source 1..27: mol_type = other DNA
caacagtatgataatttacctcgcact

SEQ ID NO: 1570 - DNA, 27 bp, synthetic construct
  misc_feature 1..27: note = Description of sequence: Sequence Name: 71281-36
  source 1..27: mol_type = other DNA
cagcagtatagtaggtcaccgtacagt

SEQ ID NO: 1571 - DNA, 27 bp, synthetic construct
  misc_feature 1..27: note = Description of sequence: Sequence Name: 71281-37
  source 1..27: mol_type = other DNA
caacagtatgataatctcccaatgacc

SEQ ID NO: 1572 - DNA, 33 bp, synthetic construct
  misc_feature 1..33: note = Description of sequence: Sequence Name: 71281-38
  source 1..33: mol_type = other DNA
gcagcatgggatgacagcctgaatggtcgggtg

SEQ ID NO: 1573 - DNA, 27 bp, synthetic construct
  misc_feature 1..27: note = Description of sequence: Sequence Name: 71281-39
  source 1..27: mol_type = other DNA
ctacagcataatactttcccgtacagt

SEQ ID NO: 1574 - DNA, 33 bp, synthetic construct
  misc_feature 1..33: note = Description of sequence: Sequence Name: 71282-1
  source 1..33: mol_type = other DNA
cagtcctacgacagcagcttgagtggttcggta

SEQ ID NO: 1575 - DNA, 27 bp, synthetic construct
  misc_feature 1..27: note = Description of sequence: Sequence Name: 71282-2
  source 1..27: mol_type = other DNA
cagcagcgtaaggactggcctctaact

SEQ ID NO: 1576 - DNA, 33 bp, synthetic construct
  misc_feature 1..33: note = Description of sequence: Sequence Name: 71282-3
  source 1..33: mol_type = other DNA
cagtcctatgacagcagcctgagtgggtcggtg

SEQ ID NO: 1577 - DNA, 27 bp, synthetic construct
  misc_feature 1..27: note = Description of sequence: Sequence Name: 71282-4
  source 1..27: mol_type = other DNA
ctacaacataataattacccttggacg

SEQ ID NO: 1578 - DNA, 33 bp, synthetic construct
  misc_feature 1..33: note = Description of sequence: Sequence Name: 71282-5
  source 1..33: mol_type = other DNA
cagtcagcagacagaagtggaaaatatgtagtt

SEQ ID NO: 1579 - DNA, 33 bp, synthetic construct
  misc_feature 1..33: note = Description of sequence: Sequence Name: 71282-6
  source 1..33: mol_type = other DNA
gcaacatgggatgacagcctgaatgcctgggtg

SEQ ID NO: 1580 - DNA, 24 bp, synthetic construct
  misc_feature 1..24: note = Description of sequence: Sequence Name: 71282-7
  source 1..24: mol_type = other DNA
cagcactatggtagctcattcact

SEQ ID NO: 1581 - DNA, 30 bp, synthetic construct
  misc_feature 1..30: note = Description of sequence: Sequence Name: 71282-8
  source 1..30: mol_type = other DNA
caacagagttacagtacccccatgtacact

SEQ ID NO: 1582 - DNA, 27 bp, synthetic construct
  misc_feature 1..27: note = Description of sequence: Sequence Name: 71282-9
  source 1..27: mol_type = other DNA
cagtactatggtaactcacctaggact

SEQ ID NO: 1583 - DNA, 30 bp, synthetic construct
  misc_feature 1..30: note = Description of sequence: Sequence Name: 71282-10
  source 1..30: mol_type = other DNA
cagcagtatggtagctcacccatgtacact

SEQ ID NO: 1584 - DNA, 27 bp, synthetic construct
  misc_feature 1..27: note = Description of sequence: Sequence Name: 71282-11
  source 1..27: mol_type = other DNA
cagacctggggcactggcattcgagtg

SEQ ID NO: 1585 - DNA, 27 bp, synthetic construct
  misc_feature 1..27: note = Description of sequence: Sequence Name: 71282-12
  source 1..27: mol_type = other DNA
caacaggattacagtacccctcaaacg

SEQ ID NO: 1586 - DNA, 30 bp, synthetic construct
  misc_feature 1..30: note = Description of sequence: Sequence Name: 71282-13
  source 1..30: mol_type = other DNA
caggtgtgggatcccaagactgattatgtc

SEQ ID NO: 1587 - DNA, 33 bp, synthetic construct
  misc_feature 1..33: note = Description of sequence: Sequence Name: 71282-14
  source 1..33: mol_type = other DNA
gcagcatgggatgacagcctgagtggttatgtc

SEQ ID NO: 1588 - DNA, 24 bp, synthetic construct
  misc_feature 1..24: note = Description of sequence: Sequence Name: 71282-15
  source 1..24: mol_type = other DNA
caacagagttacagtccccccact

SEQ ID NO: 1589 - DNA, 27 bp, synthetic construct
  misc_feature 1..27: note = Description of sequence: Sequence Name: 71282-16
  source 1..27: mol_type = other DNA
cagacgtgggacttcactcatgtggtt

SEQ ID NO: 1590 - DNA, 24 bp, synthetic construct
  misc_feature 1..24: note = Description of sequence: Sequence Name: 71282-17
  source 1..24: mol_type = other DNA
caggaatatgctagcgggtacact

SEQ ID NO: 1591 - DNA, 27 bp, synthetic construct
  misc_feature 1..27: note = Description of sequence: Sequence Name: 71282-18
  source 1..27: mol_type = other DNA
atgcaaaatatacagcttctgtacact

SEQ ID NO: 1592 - DNA, 24 bp, synthetic construct
  misc_feature 1..24: note = Description of sequence: Sequence Name: 71282-19
  source 1..24: mol_type = other DNA
caacagtatataagttttccgact

SEQ ID NO: 1593 - DNA, 27 bp, synthetic construct
  misc_feature 1..27: note = Description of sequence: Sequence Name: 71282-20
  source 1..27: mol_type = other DNA
caatcagcagacagcagaggtgtggta

SEQ ID NO: 1594 - protein, 13 aa, synthetic construct [sequence omitted]

SEQ ID NO: 1595 - protein, 11 aa, synthetic construct [sequence omitted]

SEQ ID NO: 1596 - protein, 11 aa, synthetic construct [sequence omitted]

SEQ ID NO: 1597 - protein, 12 aa, synthetic construct [sequence omitted]

SEQ ID NO: 1598 - protein, 13 aa, synthetic construct [sequence omitted]

SEQ ID NO: 1599 - protein, 11 aa, synthetic construct
  REGION 1..11: note = Description of sequence: Sequence Name: 71281-6
CQQYENLIFTF

SEQ ID NO: 1600 - protein, 13 aa, synthetic construct
  REGION 1..13: note = Description of sequence: Sequence Name: 71281-7
CQSADTGGTFVVF

SEQ ID NO: 1601 - protein, 12 aa, synthetic construct [sequence omitted]

SEQ ID NO: 1602 - protein, 13 aa, synthetic construct
  REGION 1..13: note = Description of sequence: Sequence Name: 71281-9
CYSTDSTGNHRVF

SEQ ID NO: 1603 - protein, 11 aa, synthetic construct [sequence omitted]

SEQ ID NO: 1604 - protein, 11 aa, synthetic construct [sequence omitted]

SEQ ID NO: 1605 - protein, 13 aa, synthetic construct [sequence omitted]

SEQ ID NO: 1606 - protein, 12 aa, synthetic construct
  REGION 1..12: note = Description of sequence: Sequence Name: 71281-13
CQQYDNSPRITF

SEQ ID NO: 1607 - protein, 11 aa, synthetic construct
  REGION 1..11: note = Description of sequence: Sequence Name: 71281-14
CQQRNKWPITF

SEQ ID NO: 1608 - protein, 12 aa, synthetic construct
  REGION 1..12: note = Description of sequence: Sequence Name: 71281-15
CQQLDRYPPFTF

SEQ ID NO: 1609 - protein, 12 aa, synthetic construct [sequence omitted]

SEQ ID NO: 1610 - protein, 11 aa, synthetic construct
  REGION 1..11: note = Description of sequence: Sequence Name: 71281-17
CQQRRSWPYTF

SEQ ID NO: 1611 - protein, 10 aa, synthetic construct
  REGION 1..10: note = Description of sequence: Sequence Name: 71281-18
CMQGTNWWTF

SEQ ID NO: 1612 - protein, 13 aa, synthetic construct [sequence omitted]

SEQ ID NO: 1613 - protein, 10 aa, synthetic construct
  REGION 1..10: note = Description of sequence: Sequence Name: 71281-20
CQQYYTTPEF

SEQ ID NO: 1614 - protein, 12 aa, synthetic construct [sequence omitted]

SEQ ID NO: 1615 - protein, 14 aa, synthetic construct [sequence omitted]

SEQ ID NO: 1616 - protein, 11 aa, synthetic construct [sequence omitted]

SEQ ID NO: 1617 - protein, 11 aa, synthetic construct [sequence omitted]

SEQ ID NO: 1618 - protein, 11 aa, synthetic construct [sequence omitted]

SEQ ID NO: 1619 - protein, 12 aa, synthetic construct
  REGION 1..12: note = Description of sequence: Sequence Name: 71281-26
CYSLTTTTTWVF

SEQ ID NO: 1620 - protein, 13 aa, synthetic construct [sequence omitted]

SEQ ID NO: 1621 - protein, 11 aa, synthetic construct
  REGION 1..11: note = Description of sequence: Sequence Name: 71281-28
CQQHYSTPVTF

SEQ ID NO: 1622 - protein, 13 aa, synthetic construct [sequence omitted]

SEQ ID NO: 1623 - protein, 11 aa, synthetic construct
  REGION 1..11: note = Description of sequence: Sequence Name: 71281-30
CQQYDDFPVTF

SEQ ID NO: 1624 - protein, 13 aa, synthetic construct [sequence omitted]

SEQ ID NO: 1625 - protein, 11 aa, synthetic construct
  REGION 1..11: note = Description of sequence: Sequence Name: 71281-32
CSSYTTSSVVF

SEQ ID NO: 1626 - protein, 9 aa, synthetic construct [sequence omitted]

SEQ ID NO: 1627 - protein, 11 aa, synthetic construct [sequence omitted]

SEQ ID NO: 1628 - protein, 11 aa, synthetic construct [sequence omitted]

SEQ ID NO: 1629 - protein, 11 aa, synthetic construct
  REGION 1..11: note = Description of sequence: Sequence Name: 71281-36
CQQYSRSPYSF

SEQ ID NO: 1630 - protein, 11 aa, synthetic construct [sequence omitted]

SEQ ID NO: 1631 - protein, 13 aa, synthetic construct [sequence omitted]

SEQ ID NO: 1632 - protein, 11 aa, synthetic construct
  REGION 1..11: note = Description of sequence: Sequence Name: 71281-39
CLQHNTFPYSF

SEQ ID NO: 1633 - protein, 13 aa, synthetic construct [sequence omitted]

SEQ ID NO: 1634 - protein, 11 aa, synthetic construct [sequence omitted]

SEQ ID NO: 1635 - protein, 13 aa, synthetic construct [sequence omitted]

SEQ ID NO: 1636 - protein, 11 aa, synthetic construct [sequence omitted]

SEQ ID NO: 1637 - protein, 13 aa, synthetic construct
  REGION 1..13: note = Description of sequence: Sequence Name: 71282-5
CQSADRSGKYVVF

SEQ ID NO: 1638 - protein, 13 aa, synthetic construct [sequence omitted]

SEQ ID NO: 1639 - protein, 10 aa, synthetic construct [sequence omitted]

SEQ ID NO: 1640 - protein, 12 aa, synthetic construct [sequence omitted]

SEQ ID NO: 1641 - protein, 11 aa, synthetic construct
  REGION 1..11: note = Description of sequence: Sequence Name: 71282-9
CQYYGNSPRTF

SEQ ID NO: 1642 - protein, 12 aa, synthetic construct [sequence omitted]

SEQ ID NO: 1643 - protein, 11 aa, synthetic construct [sequence omitted]

SEQ ID NO: 1644 - protein, 11 aa, synthetic construct [sequence omitted]

SEQ ID NO: 1645 - protein, 12 aa, synthetic construct
  REGION 1..12: note = Description of sequence: Sequence Name: 71282-13
CQVWDPKTDYVF

SEQ ID NO: 1646 - protein, 13 aa, synthetic construct [sequence omitted]

SEQ ID NO: 1647 - protein, 10 aa, synthetic construct [sequence omitted]

SEQ ID NO: 1648 - protein, 11 aa, synthetic construct
  REGION 1..11: note = Description of sequence: Sequence Name: 71282-16
CQTWDFTHVVF

SEQ ID NO: 1649 - protein, 10 aa, synthetic construct
  REGION 1..10: note = Description of sequence: Sequence Name: 71282-17
CQEYASGYTF

SEQ ID NO: 1650 - protein, 11 aa, synthetic construct
  REGION 1..11: note = Description of sequence: Sequence Name: 71282-18
CMQNIQLLYTF

SEQ ID NO: 1651 - protein, 10 aa, synthetic construct
  REGION 1..10: note = Description of sequence: Sequence Name: 71282-19
CQQYISFPTF

SEQ ID NO: 1652 - protein, 11 aa, synthetic construct [sequence omitted]

SEQ ID NO: 1653 - protein, 8 aa, synthetic construct
  REGION 1..8: note = Description of sequence: Sequence Name: 71281-1
EFTFSTYA

SEQ ID NO: 1654 - protein, 8 aa, synthetic construct
  REGION 1..8: note = Description of sequence: Sequence Name: 71281-2
GFTFTSYV

SEQ ID NO: 1655 - protein, 8 aa, synthetic construct
  REGION 1..8: note = Description of sequence: Sequence Name: 71281-3
GLTFSIYW

SEQ ID NO: 1656 - protein, 8 aa, synthetic construct
  REGION 1..8: note = Description of sequence: Sequence Name: 71281-4
GFTFSNYA

SEQ ID NO: 1657 - protein, 8 aa, synthetic construct
  REGION 1..8: note = Description of sequence: Sequence Name: 71281-5
GFTFNNYA

SEQ ID NO: 1658 - protein, 8 aa, synthetic construct
  REGION 1..8: note = Description of sequence: Sequence Name: 71281-6
GFTFSTYG

SEQ ID NO: 1659 - protein, 8 aa, synthetic construct
  REGION 1..8: note = Description of sequence: Sequence Name: 71281-7
GFIFSHYD

SEQ ID NO: 1660 - protein, 10 aa, synthetic construct
  REGION 1..10: note = Description of sequence: Sequence Name: 71281-8
GGSISSSSYY

SEQ ID NO: 1661 - protein, 8 aa, synthetic construct
  REGION 1..8: note = Description of sequence: Sequence Name: 71281-9
EFNFVNYW

SEQ ID NO: 1662 - protein, 8 aa, synthetic construct
  REGION 1..8: note = Description of sequence: Sequence Name: 71281-10
GFIFSDSW

SEQ ID NO: 1663 - protein, 8 aa, synthetic construct
  REGION 1..8: note = Description of sequence: Sequence Name: 71281-11
GGTLSTYT

SEQ ID NO: 1664 - protein, 10 aa, synthetic construct
  REGION 1..10: note = Description of sequence: Sequence Name: 71281-12
GDSISSSNYY

SEQ ID NO: 1665 - protein, 8 aa, synthetic construct
  REGION 1..8: note = Description of sequence: Sequence Name: 71281-13
GYSFTSYG

SEQ ID NO: 1666 - protein, 8 aa, synthetic construct
  REGION 1..8: note = Description of sequence: Sequence Name: 71281-14
GFTFTDYY

SEQ ID NO: 1667 - protein, 8 aa, synthetic construct
  REGION 1..8: note = Description of sequence: Sequence Name: 71281-15
DSTFINAW

SEQ ID NO: 1668 - protein, 8 aa, synthetic construct
  REGION 1..8: note = Description of sequence: Sequence Name: 71281-16
GFTFSGSA

SEQ ID NO: 1669 - protein, 8 aa, synthetic construct
  REGION 1..8: note = Description of sequence: Sequence Name: 71281-17
GFTFSAYW

SEQ ID NO: 1670 - protein, 8 aa, synthetic construct
  REGION 1..8: note = Description of sequence: Sequence Name: 71281-18
GFTVGSNY

SEQ ID NO: 1671 - protein, 8 aa, synthetic construct
  REGION 1..8: note = Description of sequence: Sequence Name: 71281-19
GYTFTGYY

SEQ ID NO: 1672 - protein, 8 aa, synthetic construct
  REGION 1..8: note = Description of sequence: Sequence Name: 71281-20
GFPFTTYW

SEQ ID NO: 1673 - protein, 10 aa, synthetic construct
  REGION 1..10: note = Description of sequence: Sequence Name: 71281-21
GGSIRSSDYY

SEQ ID NO: 1674 - protein, 10 aa, synthetic construct
  REGION 1..10: note = Description of sequence: Sequence Name: 71281-22
GDSISSGGYY

SEQ ID NO: 1675 - protein, 9 aa, synthetic construct
  REGION 1..9: note = Description of sequence: Sequence Name: 71281-23
GDSISSSDW

SEQ ID NO: 1676 - protein, 8 aa, synthetic construct
  REGION 1..8: note = Description of sequence: Sequence Name: 71281-24
GYSFTTYW

SEQ ID NO: 1677 - protein, 8 aa, synthetic construct
  REGION 1..8: note = Description of sequence: Sequence Name: 71281-25
GFTFSSYA

SEQ ID NO: 1678 - protein, 8 aa, synthetic construct
  REGION 1..8: note = Description of sequence: Sequence Name: 71281-26
GFAFSNYA

SEQ ID NO: 1679 - protein, 10 aa, synthetic construct
  REGION 1..10: note = Description of sequence: Sequence Name: 71281-27
GGSISSSSYY

SEQ ID NO: 1680 - protein, 8 aa, synthetic construct
  REGION 1..8: note = Description of sequence: Sequence Name: 71281-28
GYSFNAYY

SEQ ID NO: 1681 - protein, 8 aa, synthetic construct
  REGION 1..8: note = Description of sequence: Sequence Name: 71281-29
GYSFTSYW

SEQ ID NO: 1682 - protein, 8 aa, synthetic construct
  REGION 1..8: note = Description of sequence: Sequence Name: 71281-30
GFAFSDDY

SEQ ID NO: 1683 - protein, 8 aa, synthetic construct
  REGION 1..8: note = Description of sequence: Sequence Name: 71281-31
GFTFSRYG

SEQ ID NO: 1684 - protein, 10 aa, synthetic construct
  REGION 1..10: note = Description of sequence: Sequence Name: 71281-32
GFSLSTSGVG

SEQ ID NO: 1685 - protein, 8 aa, synthetic construct
  REGION 1..8: note = Description of sequence: Sequence Name: 71281-33
EIIVSVNY

SEQ ID NO: 1686 - protein, 8 aa, synthetic construct
  REGION 1..8: note = Description of sequence: Sequence Name: 71281-34
GFNFSYSA

SEQ ID NO: 1687 - protein, 8 aa, synthetic construct
  REGION 1..8: note = Description of sequence: Sequence Name: 71281-35
GFTVSRNY

SEQ ID NO: 1688 - protein, 8 aa, synthetic construct
  REGION 1..8: note = Description of sequence: Sequence Name: 71281-36
GFTFFTSS

SEQ ID NO: 1689 - protein, 8 aa, synthetic construct
  REGION 1..8: note = Description of sequence: Sequence Name: 71281-37
GFTVSSNY

SEQ ID NO: 1690 - protein, 8 aa, synthetic construct
  REGION 1..8: note = Description of sequence: Sequence Name: 71281-38
GYTFTRYA

SEQ ID NO: 1691 - protein, 8 aa, synthetic construct
  REGION 1..8: note = Description of sequence: Sequence Name: 71281-39
GFTFSTYA

SEQ ID NO: 1692 - protein, 8 aa, synthetic construct
  REGION 1..8: note = Description of sequence: Sequence Name: 71282-1
GFTFSSYA

SEQ ID NO: 1693 - protein, 8 aa, synthetic construct
  REGION 1..8: note = Description of sequence: Sequence Name: 71282-2
GFTFSSYP

SEQ ID NO: 1694 - protein, 10 aa, synthetic construct
  REGION 1..10: note = Description of sequence: Sequence Name: 71282-3
GGSIRTTSYY

SEQ ID NO: 1695 - protein, 8 aa, synthetic construct
  REGION 1..8: note = Description of sequence: Sequence Name: 71282-4
GGTFSTSA

SEQ ID NO: 1696 - protein, 8 aa, synthetic construct
  REGION 1..8: note = Description of sequence: Sequence Name: 71282-5
GFTFSSYA

SEQ ID NO: 1697 - protein, 8 aa, synthetic construct
  REGION 1..8: note = Description of sequence: Sequence Name: 71282-6
GFTFSSYS

SEQ ID NO: 1698 - protein, 8 aa, synthetic construct
  REGION 1..8: note = Description of sequence: Sequence Name: 71282-7
GFTFRSHS

SEQ ID NO: 1699 - protein, 8 aa, synthetic construct
  REGION 1..8: note = Description of sequence: Sequence Name: 71282-8
GFSLSSYW

SEQ ID NO: 1700 - protein, 8 aa, synthetic construct
  REGION 1..8: note = Description of sequence: Sequence Name: 71282-9
GFTFSSYN

SEQ ID NO: 1701 - protein, 8 aa, synthetic construct
  REGION 1..8: note = Description of sequence: Sequence Name: 71282-10
GFTFYTYA

SEQ ID NO: 1702 - protein, 8 aa, synthetic construct
  REGION 1..8: note = Description of sequence: Sequence Name: 71282-11
GFTVSSNY

SEQ ID NO: 1703 - protein, 8 aa, synthetic construct
  REGION 1..8: note = Description of sequence: Sequence Name: 71282-12
GGTFSSYA

SEQ ID NO: 1704 - protein, 8 aa, synthetic construct
  REGION 1..8: note = Description of sequence: Sequence Name: 71282-13
GFTVSSNY

SEQ ID NO: 1705 - protein, 8 aa, synthetic construct
  REGION 1..8: note = Description of sequence: Sequence Name: 71282-14
GFTFRSYG

SEQ ID NO: 1706 - protein, 8 aa, synthetic construct
  REGION 1..8: note = Description of sequence: Sequence Name: 71282-15
GFTFSNYA

SEQ ID NO: 1707 - protein, 8 aa, synthetic construct
  REGION 1..8: note = Description of sequence: Sequence Name: 71282-16
GYSITSQG

SEQ ID NO: 1708 - protein, 8 aa, synthetic construct
  REGION 1..8: note = Description of sequence: Sequence Name: 71282-17
GYTFTDYF

SEQ ID NO: 1709 - protein, 8 aa, synthetic construct
  REGION 1..8: note = Description of sequence: Sequence Name: 71282-18
GDSMSRYY

SEQ ID NO: 1710 - protein, 8 aa, synthetic construct
  REGION 1..8: note = Description of sequence: Sequence Name: 71282-19
GFTFSNYW

SEQ ID NO: 1711 - protein, 10 aa, synthetic construct
  REGION 1..10: note = Description of sequence: Sequence Name: 71282-20
GFSLNTSGVG

SEQ ID NO: 1712 - protein, 8 aa, synthetic construct
  REGION 1..8: note = Description of sequence: Sequence Name: 71281-1
ISGSGGST

SEQ ID NO: 1713 - protein, 8 aa, synthetic construct
  REGION 1..8: note = Description of sequence: Sequence Name: 71281-2
INPNTLIT

SEQ ID NO: 1714 - protein, 8 aa, synthetic construct
  REGION 1..8: note = Description of sequence: Sequence Name: 71281-3
IKQDGGEK

SEQ ID NO: 1715 - protein, 8 aa, synthetic construct
  REGION 1..8: note = Description of sequence: Sequence Name: 71281-4
INDNGGST

SEQ ID NO: 1716 - protein, 8 aa, synthetic construct
  REGION 1..8: note = Description of sequence: Sequence Name: 71281-5
VSASGGTT

SEQ ID NO: 1717 - protein, 8 aa, synthetic construct
  REGION 1..8: note = Description of sequence: Sequence Name: 71281-6
ISFDGSIK

SEQ ID NO: 1718 - protein, 8 aa, synthetic construct
  REGION 1..8: note = Description of sequence: Sequence Name: 71281-7
MSGSGGAI

SEQ ID NO: 1719 - protein, 7 aa, synthetic construct
  REGION 1..7: note = Description of sequence: Sequence Name: 71281-8
IYYSGST

SEQ ID NO: 1720 - protein, 8 aa, synthetic construct
  REGION 1..8: note = Description of sequence: Sequence Name: 71281-9
IFPGDSGT

SEQ ID NO: 1721 - protein, 8 aa, synthetic construct
  REGION 1..8: note = Description of sequence: Sequence Name: 71281-10
IKSDGSTK

SEQ ID NO: 1722 - protein, 8 aa, synthetic construct
  REGION 1..8: note = Description of sequence: Sequence Name: 71281-11
IIPVFGTS

SEQ ID NO: 1723 - protein, 7 aa, synthetic construct
  REGION 1..7: note = Description of sequence: Sequence Name: 71281-12
IYYSGTT

SEQ ID NO: 1724 - protein, 8 aa, synthetic construct
  REGION 1..8: note = Description of sequence: Sequence Name: 71281-13
ISGHNGNT

SEQ ID NO: 1725 - protein, 8 aa, synthetic construct
  REGION 1..8: note = Description of sequence: Sequence Name: 71281-14
ISSSGDYT

SEQ ID NO: 1726 - protein, 10 aa, synthetic construct
  REGION 1..10: note = Description of sequence: Sequence Name: 71281-15
IRSKRDGGTT

SEQ ID NO: 1727 - protein, 10 aa, synthetic construct
  REGION 1..10: note = Description of sequence: Sequence Name: 71281-16
IRSKANSYAT

SEQ ID NO: 1728 - protein, 8 aa, synthetic construct
  REGION 1..8: note = Description of sequence: Sequence Name: 71281-17
INSDGSSA

SEQ ID NO: 1729 - protein, 7 aa, synthetic construct
  REGION 1..7: note = Description of sequence: Sequence Name: 71281-18
LYAGGST

SEQ ID NO: 1730 - protein, 8 aa, synthetic construct
  REGION 1..8: note = Description of sequence: Sequence Name: 71281-19
INPNSGGT

SEQ ID NO: 1731 - protein, 8 aa, synthetic construct
  REGION 1..8: note = Description of sequence: Sequence Name: 71281-20
INLDGSVT

SEQ ID NO: 1732 - protein, 7 aa, synthetic construct
  REGION 1..7: note = Description of sequence: Sequence Name: 71281-21
IYYSGTR

SEQ ID NO: 1733 - protein, 7 aa, synthetic construct
  REGION 1..7: note = Description of sequence: Sequence Name: 71281-22
IYYGGNT

SEQ ID NO: 1734 - protein, 7 aa, synthetic construct
  REGION 1..7: note = Description of sequence: Sequence Name: 71281-23
IYHGGHT

SEQ ID NO: 1735 - protein, 8 aa, synthetic construct
  REGION 1..8: note = Description of sequence: Sequence Name: 71281-24
IDPSDSYT

SEQ ID NO: 1736 - protein, 8 aa, synthetic construct
  REGION 1..8: note = Description of sequence: Sequence Name: 71281-25
ISGSGGTT

SEQ ID NO: 1737 - protein, 8 aa, synthetic construct
  REGION 1..8: note = Description of sequence: Sequence Name: 71281-26
ISYGGDNT

SEQ ID NO: 1738 - protein, 7 aa, synthetic construct
  REGION 1..7: note = Description of sequence: Sequence Name: 71281-27
IYYRGST

SEQ ID NO: 1739 - protein, 8 aa, synthetic construct
  REGION 1..8: note = Description of sequence: Sequence Name: 71281-28
INPHSGDI

SEQ ID NO: 1740 - protein, 8 aa, synthetic construct
  REGION 1..8: note = Description of sequence: Sequence Name: 71281-29
IDPTDSYT

SEQ ID NO: 1741 - protein, 8 aa, synthetic construct
  REGION 1..8: note = Description of sequence: Sequence Name: 71281-30
IGGDGTYK

SEQ ID NO: 1742 - protein, 8 aa, synthetic construct
  REGION 1..8: note = Description of sequence: Sequence Name: 71281-31
ISYDGDNK

SEQ ID NO: 1743 - protein, 7 aa, synthetic construct
  REGION 1..7: note = Description of sequence: Sequence Name: 71281-32
TYWDGDT

SEQ ID NO: 1744 - protein, 7 aa, synthetic construct
  REGION 1..7: note = Description of sequence: Sequence Name: 71281-33
IYSGGST

SEQ ID NO: 1745 - protein, 8 aa, synthetic construct
  REGION 1..8: note = Description of sequence: Sequence Name: 71281-34
ISYDGTSK

SEQ ID NO: 1746 - protein, 7 aa, synthetic construct
  REGION 1..7: note = Description of sequence: Sequence Name: 71281-35
IYSGGST

SEQ ID NO: 1747 - protein, 8 aa, synthetic construct
  REGION 1..8: note = Description of sequence: Sequence Name: 71281-36
IVVGSGKT

SEQ ID NO: 1748 - protein, 7 aa, synthetic construct
  REGION 1..7: note = Description of sequence: Sequence Name: 71281-37
IYPGGTT

SEQ ID NO: 1749 - protein, 8 aa, synthetic construct
  REGION 1..8: note = Description of sequence: Sequence Name: 71281-38
INTNTGNP

SEQ ID NO: 1750 - protein, 8 aa, synthetic construct
  REGION 1..8: note = Description of sequence: Sequence Name: 71281-39
ISYDGYNK

SEQ ID NO: 1751 - protein, 8 aa, synthetic construct
  REGION 1..8: note = Description of sequence: Sequence Name: 71282-1
ISGGGGST

SEQ ID NO: 1752 - protein, 5 aa, synthetic construct
  REGION 1..5: note = Description of sequence: Sequence Name: 71282-2
ITATT

SEQ ID NO: 1753 - protein, 7 aa, synthetic construct
  REGION 1..7: note = Description of sequence: Sequence Name: 71282-3
MYYTGST

SEQ ID NO: 1754 - protein, 8 aa, synthetic construct
  REGION 1..8: note = Description of sequence: Sequence Name: 71282-4
IIPFFGTP

SEQ ID NO: 1755 - protein, 8 aa, synthetic construct
  REGION 1..8: note = Description of sequence: Sequence Name: 71282-5
ISGDGAST

SEQ ID NO: 1756 - protein, 8 aa, synthetic construct
  REGION 1..8: note = Description of sequence: Sequence Name: 71282-6
ISSSSSTI

SEQ ID NO: 1757 - protein, 8 aa, synthetic construct
  REGION 1..8: note = Description of sequence: Sequence Name: 71282-7
ISYDGYNK

SEQ ID NO: 1758 - protein, 8 aa, synthetic construct
  REGION 1..8: note = Description of sequence: Sequence Name: 71282-8
INRDGSEK

SEQ ID NO: 1759 - protein, 8 aa, synthetic construct
  REGION 1..8: note = Description of sequence: Sequence Name: 71282-9
ISTSSDYI

SEQ ID NO: 1760 - protein, 8 aa, synthetic construct
  REGION 1..8: note = Description of sequence: Sequence Name: 71282-10
ISYDGINK

SEQ ID NO: 1761 - protein, 7 aa, synthetic construct
  REGION 1..7: note = Description of sequence: Sequence Name: 71282-11
IYSGGST

SEQ ID NO: 1762 - protein, 8 aa, synthetic construct
  REGION 1..8: note = Description of sequence: Sequence Name: 71282-12
IIPIFGTA

SEQ ID NO: 1763 - protein, 7 aa, synthetic construct
  REGION 1..7: note = Description of sequence: Sequence Name: 71282-13
IYTGGST

SEQ ID NO: 1764 - protein, 8 aa, synthetic construct
  REGION 1..8: note = Description of sequence: Sequence Name: 71282-14
ISYDGSNK

SEQ ID NO: 1765 - protein, 8 aa, synthetic construct
  REGION 1..8: note = Description of sequence: Sequence Name: 71282-15
ITGTGYNT

SEQ ID NO: 1766 - protein, 8 aa, synthetic construct
  REGION 1..8: note = Description of sequence: Sequence Name: 71282-16
ISRDNDNT

SEQ ID NO: 1767 - protein, 8 aa, synthetic construct
  REGION 1..8: note = Description of sequence: Sequence Name: 71282-17
VQCGGNFI

SEQ ID NO: 1768 - protein, 7 aa, synthetic construct
  REGION 1..7: note = Description of sequence: Sequence Name: 71282-18
IYYSGST

SEQ ID NO: 1769 - protein, 8 aa, synthetic construct
  REGION 1..8: note = Description of sequence: Sequence Name: 71282-19
IKQDRSEK

SEQ ID NO: 1770 - protein, 7 aa, synthetic construct
  REGION 1..7: note = Description of sequence: Sequence Name: 71282-20
IYWNDDE

SEQ ID NO: 1771 - protein, 20 aa, synthetic construct
  REGION 1..20: note = Description of sequence: Sequence Name: 71281-1
AKTIPYYDDLTGRTYDWFDP

SEQ ID NO: 1772 - protein, 15 aa, synthetic construct
  REGION 1..15: note = Description of sequence: Sequence Name: 71281-2
ARGMMGVTGADYFGF

SEQ ID NO: 1773 - protein, 12 aa, synthetic construct
  REGION 1..12: note = Description of sequence: Sequence Name: 71281-3
VSCSSSSWEFDY

SEQ ID NO: 1774 - protein, 24 aa, synthetic construct
  REGION 1..24: note = Description of sequence: Sequence Name: 71281-4
VKTTGAWGDVFDYDSGTYLYHFDY

SEQ ID NO: 1775 - protein, 18 aa, synthetic construct
  REGION 1..18: note = Description of sequence: Sequence Name: 71281-5
ANLISLVDDFWSDYYDDY

SEQ ID NO: 1776 - protein, 14 aa, synthetic construct
  REGION 1..14: note = Description of sequence: Sequence Name: 71281-6
ARSPGTAWGGYMDV

SEQ ID NO: 1777 - protein, 12 aa, synthetic construct
  REGION 1..12: note = Description of sequence: Sequence Name: 71281-7
ARQKQQYFYFDY

SEQ ID NO: 1778 - protein, 16 aa, synthetic construct
  REGION 1..16: note = Description of sequence: Sequence Name: 71281-8
ARLKVGPAPGTRVFDY

SEQ ID NO: 1779 - protein, 14 aa, synthetic construct
  REGION 1..14: note = Description of sequence: Sequence Name: 71281-9
ATPSSGRTGEGMDV

SEQ ID NO: 1780 - protein, 10 aa, synthetic construct
  REGION 1..10: note = Description of sequence: Sequence Name: 71281-10
ARHGDYAFDS

SEQ ID NO: 1781 - protein, 13 aa, synthetic construct
  REGION 1..13: note = Description of sequence: Sequence Name: 71281-11
ARGQPYSISPFES

SEQ ID NO: 1782 - protein, 20 aa, synthetic construct
  REGION 1..20: note = Description of sequence: Sequence Name: 71281-12
ARHDSAALAGDWSSGWPFDY

SEQ ID NO: 1783 - protein, 19 aa, synthetic construct
  REGION 1..19: note = Description of sequence: Sequence Name: 71281-13
ARDPRIVVMVAANRRRIDY

SEQ ID NO: 1784 - protein, 18 aa, synthetic construct
  REGION 1..18: note = Description of sequence: Sequence Name: 71281-14
ARDTVPNCGTKCYLTFDY

SEQ ID NO: 1785 - protein, 19 aa, synthetic construct
  REGION 1..19: note = Description of sequence: Sequence Name: 71281-15
ASHLSGSGTYHPPQYGLDV

SEQ ID NO: 1786 - protein, 11 aa, synthetic construct
  REGION 1..11: note = Description of sequence: Sequence Name: 71281-16
TRIQRTEGFDY

SEQ ID NO: 1787 - protein, 18 aa, synthetic construct
  REGION 1..18: note = Description of sequence: Sequence Name: 71281-17
ARDGLISVSGSYYGLPGV

SEQ ID NO: 1788 - protein, 7 aa, synthetic construct
  REGION 1..7: note = Description of sequence: Sequence Name: 71281-18
ARRDGSH

SEQ ID NO: 1789 - protein, 23 aa, synthetic construct
  REGION 1..23: note = Description of sequence: Sequence Name: 71281-19
ARDWDGDDSSVYYRVYNYYGMDV

SEQ ID NO: 1790 - protein, 15 aa, synthetic construct
  REGION 1..15: note = Description of sequence: Sequence Name: 71281-20
ARQFLRGVVINWFGP

SEQ ID NO: 1791 - protein, 17 aa, synthetic construct
  REGION 1..17: note = Description of sequence: Sequence Name: 71281-21
ARQRKAARPIYYYYMDV

SEQ ID NO: 1792 - protein, 16 aa, synthetic construct
  REGION 1..16: note = Description of sequence: Sequence Name: 71281-22
ARALGDLPYYYYGLDV

SEQ ID NO: 1793 - protein, 15 aa, synthetic construct
  REGION 1..15: note = Description of sequence: Sequence Name: 71281-23
ARDHSGPGNSWSFDY

SEQ ID NO: 1794 - protein, 12 aa, synthetic construct
  REGION 1..12: note = Description of sequence: Sequence Name: 71281-24
ARHGANPTAFDI

SEQ ID NO: 1795 - protein, 18 aa, synthetic construct
  REGION 1..18: note = Description of sequence: Sequence Name: 71281-25
ARTRDIVLLPTVVAGDSD

SEQ ID NO: 1796 - protein, 14 aa, synthetic construct
  REGION 1..14: note = Description of sequence: Sequence Name: 71281-26
VSPGDNVPDWYFDL

SEQ ID NO: 1797 - protein, 18 aa, synthetic construct
  REGION 1..18: note = Description of sequence: Sequence Name: 71281-27
ARRGLLLLAVAGSGAFGI

SEQ ID NO: 1798 - protein, 21 aa, synthetic construct
  REGION 1..21: note = Description of sequence: Sequence Name: 71281-28
ARDAKRFLEWSEIYLYWYMDV

SEQ ID NO: 1799 - protein, 17 aa, synthetic construct
  REGION 1..17: note = Description of sequence: Sequence Name: 71281-29
AKDYGDYDLGYYYAMDV

SEQ ID NO: 1800 - protein, 14 aa, synthetic construct
  REGION 1..14: note = Description of sequence: Sequence Name: 71281-30
VRGLGVGATGHPRY

SEQ ID NO: 1801 - protein, 21 aa, synthetic construct
  REGION 1..21: note = Description of sequence: Sequence Name: 71281-31
AKDPTARLGYCRGGSCYLADY

SEQ ID NO: 1802 - protein, 11 aa, synthetic construct
  REGION 1..11: note = Description of sequence: Sequence Name: 71281-32
VHHTITMIVGY

SEQ ID NO: 1803 - protein, 11 aa, synthetic construct
  REGION 1..11: note = Description of sequence: Sequence Name: 71281-33
ARGFGDHYFNS

SEQ ID NO: 1804 - protein, 15 aa, synthetic construct
  REGION 1..15: note = Description of sequence: Sequence Name: 71281-34
ARDYYARSWDGYFDH

SEQ ID NO: 1805 - protein, 11 aa, synthetic construct
  REGION 1..11: note = Description of sequence: Sequence Name: 71281-35
ARETPGYGDEA

SEQ ID NO: 1806 - protein, 16 aa, synthetic construct
  REGION 1..16: note = Description of sequence: Sequence Name: 71281-36
AAPNCTGGSCFDGFNL

SEQ ID NO: 1807 - protein, 13 aa, synthetic construct
  REGION 1..13: note = Description of sequence: Sequence Name: 71281-37
ARGPYCRGAGCRP

SEQ ID NO: 1808 - protein, 25 aa, synthetic construct
  REGION 1..25: note = Description of sequence: Sequence Name: 71281-38
ASVPHPHCSSTSCYAGDYYYFGVDV

SEQ ID NO: 1809 - protein, 11 aa, synthetic construct
  REGION 1..11: note = Description of sequence: Sequence Name: 71281-39
ARDTTPYGMDV

SEQ ID NO: 1810 - protein, 17 aa, synthetic construct
  REGION 1..17: note = Description of sequence: Sequence Name: 71282-1
AKYYYDISAYYIPNFDY

SEQ ID NO: 1811 - protein, 17 aa, synthetic construct
  REGION 1..17: note = Description of sequence: Sequence Name: 71282-2
AKHLKPCSDSCYATLDY

SEQ ID NO: 1812 - protein, 14 aa, synthetic construct
  REGION 1..14: note = Description of sequence: Sequence Name: 71282-3
ARHSRSRGGYTYDY

SEQ ID NO: 1813 - protein, 15 aa, synthetic construct
  REGION 1..15: note = Description of sequence: Sequence Name: 71282-4
ANDYTSSGWYTPLDY

SEQ ID NO: 1814 - protein, 16 aa, synthetic construct
  REGION 1..16: note = Description of sequence: Sequence Name: 71282-5
AKDLEDYGDFAACFDS

SEQ ID NO: 1815 - protein, 19 aa, synthetic construct
  REGION 1..19: note = Description of sequence: Sequence Name: 71282-6
ARDGDYYDSSGHSREAFDI

SEQ ID NO: 1816 - protein, 14 aa, synthetic construct
  REGION 1..14: note = Description of sequence: Sequence Name: 71282-7
ARAGGGTYYSWFDP

SEQ ID NO: 1817 - protein, 18 aa, synthetic construct
  REGION 1..18: note = Description of sequence: Sequence Name: 71282-8
ARDPTSHWLVGEPPYFDY

SEQ ID NO: 1818 - protein, 13 aa, synthetic construct
  REGION 1..13: note = Description of sequence: Sequence Name: 71282-9
ARDVIGEWEPHAY

SEQ ID NO: 1819 - protein, 14 aa, synthetic construct
  REGION 1..14: note = Description of sequence: Sequence Name: 71282-10
ARAYGGSYSGAFDI

SEQ ID NO: 1820 - protein, 15 aa, synthetic construct
  REGION 1..15: note = Description of sequence: Sequence Name: 71282-11
ARDRGGRSFLDGMDV

SEQ ID NO: 1821 - protein, 21 aa, synthetic construct
  REGION 1..21: note = Description of sequence: Sequence Name: 71282-12
ARTVTPIRYCTSTSCFTRLHY

SEQ ID NO: 1822 - protein, 16 aa, synthetic construct
  REGION 1..16: note = Description of sequence: Sequence Name: 71282-13
ARDPLVGTTRLHAFDI

SEQ ID NO: 1823 - protein, 19 aa, synthetic construct
  REGION 1..19: note = Description of sequence: Sequence Name: 71282-14
AAVVDIVVVPSIILLPPDY

SEQ ID NO: 1824 - protein, 19 aa, synthetic construct
  REGION 1..19: note = Description of sequence: Sequence Name: 71282-15
AKDAGGRFGELLRDHYFDS

SEQ ID NO: 1825 - protein, 13 aa, synthetic construct
  REGION 1..13: note = Description of sequence: Sequence Name: 71282-16
ARDSWKPQGGIDF

SEQ ID NO: 1826 - protein, 13 aa, synthetic construct
  REGION 1..13: note = Description of sequence: Sequence Name: 71282-17
AREVVTGVGAKAY

SEQ ID NO: 1827 - protein, 17 aa, synthetic construct
  REGION 1..17: note = Description of sequence: Sequence Name: 71282-18
ARTYYYDRSGPTHAFDI

SEQ ID NO: 1828 - protein, 24 aa, synthetic construct
  REGION 1..24: note = Description of sequence: Sequence Name: 71282-19
ARGVAMVDTVLTITPARGNWHFDL

SEQ ID NO: 1829 - protein, 22 aa, synthetic construct
  REGION 1..22: note = Description of sequence: Sequence Name: 71282-20
GHRRQFHYNSIGSYYEEYYFDY

SEQ ID NO: 1830 - protein, 8 aa, synthetic construct
  REGION 1..8: note = Description of sequence: Sequence Name: 71281-1
SSNIGNNY

SEQ ID NO: 1831 - protein, 12 aa, synthetic construct
  REGION 1..12: note = Description of sequence: Sequence Name: 71281-2
QSVFYSSTNNSY

SEQ ID NO: 1832 - protein, 6 aa, synthetic construct
  REGION 1..6: note = Description of sequence: Sequence Name: 71281-3
KLGDKF

SEQ ID NO: 1833 - protein, 6 aa, synthetic construct
  REGION 1..6: note = Description of sequence: Sequence Name: 71281-4
QSVSSN

SEQ ID NO: 1834 - protein, 8 aa, synthetic construct
  REGION 1..8: note = Description of sequence: Sequence Name: 71281-5
SSNIEKNY

SEQ ID NO: 1835 - protein, 6 aa, synthetic construct
  REGION 1..6: note = Description of sequence: Sequence Name: 71281-6
QDINNY

SEQ ID NO: 1836 - protein, 6 aa, synthetic construct
  REGION 1..6: note = Description of sequence: Sequence Name: 71281-7
NLPKQY

SEQ ID NO: 1837 - protein, 6 aa, synthetic construct
  REGION 1..6: note = Description of sequence: Sequence Name: 71281-8
QSIARF

SEQ ID NO: 1838 - protein, 6 aa, synthetic construct
  REGION 1..6: note = Description of sequence: Sequence Name: 71281-9
ALPKKY

SEQ ID NO: 1839 - protein, 11 aa, synthetic construct
  REGION 1..11: note = Description of sequence: Sequence Name: 71281-10
QSLLRSNGKNH

SEQ ID NO: 1840 - protein, 6 aa, synthetic construct
  REGION 1..6: note = Description of sequence: Sequence Name: 71281-11
QSVSSY

SEQ ID NO: 1841 - protein, 6 aa, synthetic construct
  REGION 1..6: note = Description of sequence: Sequence Name: 71281-12
SLRYYY

SEQ ID NO: 1842 - protein, 6 aa, synthetic construct
  REGION 1..6: note = Description of sequence: Sequence Name: 71281-13
QDINYY

SEQ ID NO: 1843 - protein, 6 aa, synthetic construct
  REGION 1..6: note = Description of sequence: Sequence Name: 71281-14
QSVRTH

SEQ ID NO: 1844 - protein, 6 aa, synthetic construct
  REGION 1..6: note = Description of sequence: Sequence Name: 71281-15
QAISTY

SEQ ID NO: 1845 - protein, 7 aa, synthetic construct
  REGION 1..7: note = Description of sequence: Sequence Name: 71281-16
QSVSSSY

SEQ ID NO: 1846 - protein, 6 aa, synthetic construct
  REGION 1..6: note = Description of sequence: Sequence Name: 71281-17
QSVSSY

SEQ ID NO: 1847 - protein, 11 aa, synthetic construct
  REGION 1..11: note = Description of sequence: Sequence Name: 71281-18
QSLVYGDGNTF

SEQ ID NO: 1848 - protein, 8 aa, synthetic construct
  REGION 1..8: note = Description of sequence: Sequence Name: 71281-19
NSNIGSNY

SEQ ID NO: 1849 - protein, 12 aa, synthetic construct
  REGION 1..12: note = Description of sequence: Sequence Name: 71281-20
QSVLNSSNNKNY

SEQ ID NO: 1850 - protein, 6 aa, synthetic construct
  REGION 1..6: note = Description of sequence: Sequence Name: 71281-21
QSVSSY

SEQ ID NO: 1851 - protein, 8 aa, synthetic construct
  REGION 1..8: note = Description of sequence: Sequence Name: 71281-22
SSNIGSNT

SEQ ID NO: 1852 - protein, 7 aa, synthetic construct
  REGION 1..7: note = Description of sequence: Sequence Name: 71281-23
QSVSNNN

SEQ ID NO: 1853 - protein, 12 aa, synthetic construct
  REGION 1..12: note = Description of sequence: Sequence Name: 71281-24
QSVLYSSNNKNY

SEQ ID NO: 1854 - protein, 11 aa, synthetic construct
  REGION 1..11: note = Description of sequence: Sequence Name: 71281-25
QSLVYSDGNTY

SEQ ID NO: 1855 - protein, 9 aa, synthetic construct
  REGION 1..9: note = Description of sequence: Sequence Name: 71281-26
SSDVGAYNY

SEQ ID NO: 1856 - protein, 8 aa, synthetic construct
  REGION 1..8: note = Description of sequence: Sequence Name: 71281-27
SSNIGNNY

SEQ ID NO: 1857 - protein, 12 aa, synthetic construct
  REGION 1..12: note = Description of sequence: Sequence Name: 71281-28
QSVLYSSNNKNY

SEQ ID NO: 1858 - protein, 9 aa, synthetic construct
  REGION 1..9: note = Description of sequence: Sequence Name: 71281-29
SSNIGAGYD

SEQ ID NO: 1859 - protein, 6 aa, synthetic construct
  REGION 1..6: note = Description of sequence: Sequence Name: 71281-30
QHIGTF

SEQ ID NO: 1860 - protein, 6 aa, synthetic construct
  REGION 1..6: note = Description of sequence: Sequence Name: 71281-31
NIESKS

SEQ ID NO: 1861 - protein, 9 aa, synthetic construct
  REGION 1..9: note = Description of sequence: Sequence Name: 71281-32
SSDVGAYNY

SEQ ID NO: 1862 - protein, 6 aa, synthetic construct
  REGION 1..6: note = Description of sequence: Sequence Name: 71281-33
QGISTF

SEQ ID NO: 1863 - protein, 6 aa, synthetic construct
  REGION 1..6: note = Description of sequence: Sequence Name: 71281-34
QGIAGY

SEQ ID NO: 1864 - protein, 6 aa, synthetic construct
  REGION 1..6: note = Description of sequence: Sequence Name: 71281-35
QDISKY

SEQ ID NO: 1865 - protein, 7 aa, synthetic construct
  REGION 1..7: note = Description of sequence: Sequence Name: 71281-36
QSVRSDY

SEQ ID NO: 1866 - protein, 6 aa, synthetic construct
  REGION 1..6: note = Description of sequence: Sequence Name: 71281-37
QDIRNF

SEQ ID NO: 1867 - protein, 8 aa, synthetic construct
  REGION 1..8: note = Description of sequence: Sequence Name: 71281-38
SSNIGSNT

SEQ ID NO: 1868 - protein, 6 aa, synthetic construct
  REGION 1..6: note = Description of sequence: Sequence Name: 71281-39
QDIRDD

SEQ ID NO: 1869 - protein, 9 aa, synthetic construct
  REGION 1..9: note = Description of sequence: Sequence Name: 71282-1
SSNIGAGYD

SEQ ID NO: 1870 - protein, 6 aa, synthetic construct
  REGION 1..6: note = Description of sequence: Sequence Name: 71282-2
QSVSSY

SEQ ID NO: 1871 - protein, 9 aa, synthetic construct
  REGION 1..9: note = Description of sequence: Sequence Name: 71282-3
NSNIGAGYD

SEQ ID NO: 1872 - protein, 6 aa, synthetic construct
  REGION 1..6: note = Description of sequence: Sequence Name: 71282-4
QDINIY

SEQ ID NO: 1873 - protein, 6 aa, synthetic construct
  REGION 1..6: note = Description of sequence: Sequence Name: 71282-5
ALPMQY

SEQ ID NO: 1874 - protein, 8 aa, synthetic construct
  REGION 1..8: note = Description of sequence: Sequence Name: 71282-6
SSNIGNNA

SEQ ID NO: 1875 - protein, 7 aa, synthetic construct
  REGION 1..7: note = Description of sequence: Sequence Name: 71282-7
QSVSSSY

SEQ ID NO: 1876 - protein, 6 aa, synthetic construct
  REGION 1..6: note = Description of sequence: Sequence Name: 71282-8
QSINTY

SEQ ID NO: 1877 - protein, 7 aa, synthetic construct
  REGION 1..7: note = Description of sequence: Sequence Name: 71282-9
QYFSSSH

SEQ ID NO: 1878 - protein, 7 aa, synthetic construct
  REGION 1..7: note = Description of sequence: Sequence Name: 71282-10
QGVSSNY

SEQ ID NO: 1879 - protein, 7 aa, synthetic construct
  REGION 1..7: note = Description of sequence: Sequence Name: 71282-11
SGHSSYA

SEQ ID NO: 1880 - protein, 6 aa, synthetic construct
  REGION 1..6: note = Description of sequence: Sequence Name: 71282-12
QSISSY

SEQ ID NO: 1881 - protein, 6 aa, synthetic construct
  REGION 1..6: note = Description of sequence: Sequence Name: 71282-13
NIGSKS

SEQ ID NO: 1882 - protein, 8 aa, synthetic construct
  REGION 1..8: note = Description of sequence: Sequence Name: 71282-14
SSNIESNY

SEQ ID NO: 1883 - protein, 6 aa, synthetic construct
  REGION 1..6: note = Description of sequence: Sequence Name: 71282-15
QSINAY

SEQ ID NO: 1884 - protein, 6 aa, synthetic construct
  REGION 1..6: note = Description of sequence: Sequence Name: 71282-16
KLDNKY

SEQ ID NO: 1885 - protein, 7 aa, synthetic construct
  REGION 1..7: note = Description of sequence: Sequence Name: 71282-17
QAVSRSK

SEQ ID NO: 1886 - protein, 11 aa, synthetic construct
  REGION 1..11: note = Description of sequence: Sequence Name: 71282-18
QSLLHSDGKTY

SEQ ID NO: 1887 - protein, 6 aa, synthetic construct
  REGION 1..6: note = Description of sequence: Sequence Name: 71282-19
QSISQW

SEQ ID NO: 1888 - protein, 6 aa, synthetic construct
  REGION 1..6: note = Description of sequence: Sequence Name: 71282-20
AWPKQY

SEQ ID NO: 1889-1937 - skipped (49 entries)

SEQ ID NO: 1938 - protein, 7 aa, synthetic construct
  REGION 1..7: note = Description of sequence: Sequence Name: 71282-1
LNSDGSH

SEQ ID NO: 1939-1947 - skipped (9 entries)

SEQ ID NO: 1948 - protein, 11 aa, synthetic construct
  REGION 1..11: note = Description of sequence: Sequence Name: 71281-1
GTWDSSLSAFV

SEQ ID NO: 1949 - protein, 9 aa, synthetic construct
  REGION 1..9: note = Description of sequence: Sequence Name: 71281-2
QQYYNTPLT

SEQ ID NO: 1950 - protein, 9 aa, synthetic construct
  REGION 1..9: note = Description of sequence: Sequence Name: 71281-3
QAWASSTAI

SEQ ID NO: 1951 - protein, 10 aa, synthetic construct
  REGION 1..10: note = Description of sequence: Sequence Name: 71281-4
QQYNNWPSYT

SEQ ID NO: 1952 - protein, 11 aa, synthetic construct
  REGION 1..11: note = Description of sequence: Sequence Name: 71281-5
GTWDSSLRAVV

SEQ ID NO: 1953 - protein, 9 aa, synthetic construct
  REGION 1..9: note = Description of sequence: Sequence Name: 71281-6
QQYENLIFT

SEQ ID NO: 1954 - protein, 11 aa, synthetic construct
  REGION 1..11: note = Description of sequence: Sequence Name: 71281-7
QSADTGGTFVV

SEQ ID NO: 1955 - protein, 10 aa, synthetic construct
  REGION 1..10: note = Description of sequence: Sequence Name: 71281-8
QQSYSVPPLT

SEQ ID NO: 1956 - protein, 11 aa, synthetic construct
  REGION 1..11: note = Description of sequence: Sequence Name: 71281-9
YSTDSTGNHRV

SEQ ID NO: 1957 - protein, 9 aa, synthetic construct
  REGION 1..9: note = Description of sequence: Sequence Name: 71281-10
MQALQIPWT

SEQ ID NO: 1958 - protein, 9 aa, synthetic construct
  REGION 1..9: note = Description of sequence: Sequence Name: 71281-11
QQCGSSPRT

SEQ ID NO: 1959 - protein, 11 aa, synthetic construct
  REGION 1..11: note = Description of sequence: Sequence Name: 71281-12
NSRDSSGNHWV

SEQ ID NO: 1960 - protein, 10 aa, synthetic construct
  REGION 1..10: note = Description of sequence: Sequence Name: 71281-13
QQYDNSPRIT

SEQ ID NO: 1961 - protein, 9 aa, synthetic construct
  REGION 1..9: note = Description of sequence: Sequence Name: 71281-14
QQRNKWPIT

SEQ ID NO: 1962 - protein, 10 aa, synthetic construct
  REGION 1..10: note = Description of sequence: Sequence Name: 71281-15
QQLDRYPPFT

SEQ ID NO: 1963 - protein, 10 aa, synthetic construct
  REGION 1..10: note = Description of sequence: Sequence Name: 71281-16
QHYGSSPPRT

SEQ ID NO: 1964 - protein, 9 aa, synthetic construct
  REGION 1..9: note = Description of sequence: Sequence Name: 71281-17
QQRRSWPYT

SEQ ID NO: 1965 - protein, 8 aa, synthetic construct
  REGION 1..8: note = Description of sequence: Sequence Name: 71281-18
MQGTNWWT

SEQ ID NO: 1966 - protein, 11 aa, synthetic construct
  REGION 1..11: note = Description of sequence: Sequence Name: 71281-19
AAWDDSLSGPV

SEQ ID NO: 1967 - protein, 8 aa, synthetic construct
  REGION 1..8: note = Description of sequence: Sequence Name: 71281-20
QQYYTTPE

SEQ ID NO: 1968 - protein, 10 aa, synthetic construct
  REGION 1..10: note = Description of sequence: Sequence Name: 71281-21
QQRGNWPPIT

SEQ ID NO: 1969 - protein, 12 aa, synthetic construct
  REGION 1..12: note = Description of sequence: Sequence Name: 71281-22
ATWDDSLSGLYV

SEQ ID NO: 1970 - protein, 9 aa, synthetic construct
  REGION 1..9: note = Description of sequence: Sequence Name: 71281-23
QHYDNSVWT

SEQ ID NO: 1971 - protein, 9 aa, synthetic construct
  REGION 1..9: note = Description of sequence: Sequence Name: 71281-24
QQYYSAPWT

SEQ ID NO: 1972 - protein, 9 aa, synthetic construct
  REGION 1..9: note = Description of sequence: Sequence Name: 71281-25
MQGTQWPWT

SEQ ID NO: 1973 - protein, 10 aa, synthetic construct
  REGION 1..10: note = Description of sequence: Sequence Name: 71281-26
YSLTTTTTWV

SEQ ID NO: 1974 - protein, 11 aa, synthetic construct
  REGION 1..11: note = Description of sequence: Sequence Name: 71281-27
GTWDSSLSTEV

SEQ ID NO: 1975 - protein, 9 aa, synthetic construct
  REGION 1..9: note = Description of sequence: Sequence Name: 71281-28
QQHYSTPVT

SEQ ID NO: 1976 - protein, 11 aa, synthetic construct
  REGION 1..11: note = Description of sequence: Sequence Name: 71281-29
QSYDSSLSGWV

SEQ ID NO: 1977 - protein, 9 aa, synthetic construct
  REGION 1..9: note = Description of sequence: Sequence Name: 71281-30
QQYDDFPVT

SEQ ID NO: 1978 - protein, 11 aa, synthetic construct
  REGION 1..11: note = Description of sequence: Sequence Name: 71281-31
QVWESSSDHVI

SEQ ID NO: 1979 - protein, 9 aa, synthetic construct
  REGION 1..9: note = Description of sequence: Sequence Name: 71281-32
SSYTTSSVV

SEQ ID NO: 1980 - protein, 7 aa, synthetic construct
  REGION 1..7: note = Description of sequence: Sequence Name: 71281-33
QQYNTYT

SEQ ID NO: 1981 - protein, 9 aa, synthetic construct
  REGION 1..9: note = Description of sequence: Sequence Name: 71281-34
QQVNSYPRT

SEQ ID NO: 1982 - protein, 9 aa, synthetic construct
  REGION 1..9: note = Description of sequence: Sequence Name: 71281-35
QQYDNLPRT

SEQ ID NO: 1983 - protein, 9 aa, synthetic construct
  REGION 1..9: note = Description of sequence: Sequence Name: 71281-36
QQYSRSPYS

SEQ ID NO: 1984 - protein, 9 aa, synthetic construct
  REGION 1..9: note = Description of sequence: Sequence Name: 71281-37
QQYDNLPMT

SEQ ID NO: 1985 - protein, 11 aa, synthetic construct
  REGION 1..11: note = Description of sequence: Sequence Name: 71281-38
AAWDDSLNGRV

SEQ ID NO: 1986 - protein, 9 aa, synthetic construct
  REGION 1..9: note = Description of sequence: Sequence Name: 71281-39
LQHNTFPYS

SEQ ID NO: 1987 - protein, 11 aa, synthetic construct
  REGION 1..11: note = Description of sequence: Sequence Name: 71282-1
QSYDSSLSGSV

SEQ ID NO: 1988 - protein, 9 aa, synthetic construct
  REGION 1..9: note = Description of sequence: Sequence Name: 71282-2
QQRKDWPLT

SEQ ID NO: 1989 - protein, 11 aa, synthetic construct
  REGION 1..11: note = Description of sequence: Sequence Name: 71282-3
QSYDSSLSGSV

SEQ ID NO: 1990 - protein, 9 aa, synthetic construct
  REGION 1..9: note = Description of sequence: Sequence Name: 71282-4
LQHNNYPWT

SEQ ID NO: 1991 - protein, 11 aa, synthetic construct
  REGION 1..11: note = Description of sequence: Sequence Name: 71282-5
QSADRSGKYVV

SEQ ID NO: 1992 - protein, 11 aa, synthetic construct
  REGION 1..11: note = Description of sequence: Sequence Name: 71282-6
ATWDDSLNAWV

SEQ ID NO: 1993 - protein, 8 aa, synthetic construct
  REGION 1..8: note = Description of sequence: Sequence Name: 71282-7
QHYGSSFT

SEQ ID NO: 1994 - protein, 10 aa, synthetic construct
  REGION 1..10: note = Description of sequence: Sequence Name: 71282-8
QQSYSTPMYT

SEQ ID NO: 1995 - protein, 9 aa, synthetic construct
  REGION 1..9: note = Description of sequence: Sequence Name: 71282-9
QYYGNSPRT

SEQ ID NO: 1996 - protein, 10 aa, synthetic construct
  REGION 1..10: note = Description of sequence: Sequence Name: 71282-10
QQYGSSPMYT

SEQ ID NO: 1997 - protein, 9 aa, synthetic construct
  REGION 1..9: note = Description of sequence: Sequence Name: 71282-11
QTWGTGIRV

SEQ ID NO: 1998 - protein, 9 aa, synthetic construct
  REGION 1..9: note = Description of sequence: Sequence Name: 71282-12
QQDYSTPQT

SEQ ID NO: 1999 - protein, 10 aa, synthetic construct
  REGION 1..10: note = Description of sequence: Sequence Name: 71282-13
QVWDPKTDYV

SEQ ID NO: 2000 - protein, 11 aa, synthetic construct
  REGION 1..11: note = Description of sequence: Sequence Name: 71282-14
AAWDDSLSGYV

SEQ ID NO: 2001 - protein, 8 aa, synthetic construct
  REGION 1..8: note = Description of sequence: Sequence Name: 71282-15
QQSYSPPT

SEQ ID NO: 2002 - protein, 9 aa, synthetic construct
  REGION 1..9: note = Description of sequence: Sequence Name: 71282-16
QTWDFTHVV

SEQ ID NO: 2003 - protein, 8 aa, synthetic construct
  REGION 1..8: note = Description of sequence: Sequence Name: 71282-17
QEYASGYT

SEQ ID NO: 2004 - protein, 9 aa, synthetic construct
  REGION 1..9: note = Description of sequence: Sequence Name: 71282-18
MQNIQLLYT

SEQ ID NO: 2005 - protein, 8 aa, synthetic construct
  REGION 1..8: note = Description of sequence: Sequence Name: 71282-19
QQYISFPT

SEQ ID NO: 2006 - protein, 9 aa, synthetic construct
  REGION 1..9: note = Description of sequence: Sequence Name: 71282-20
QSADSRGVV

SEQ ID NO: 2007 - DNA, 47 bp, synthetic construct
  misc_feature 1..47: note = Description of sequence: Bar code carrier sequence
  source 1..47: mol_type = other DNA
  variation 22..34: note = n is a, c, g or t
ccttggcacccgagaattccannnnnnnnnnnnncccatataagaaa

SEQ ID NO: 2008 - DNA, 15 bp, synthetic construct
  misc_feature 1..15: note = Description of sequence: SARS-CoV-2 S HP
  source 1..15: mol_type = other DNA
acaatttgtctgcga

SEQ ID NO: 2009 - DNA, 15 bp, synthetic construct
  misc_feature 1..15: note = Description of sequence: SARS-CoV-2 Alpha S HP
  source 1..15: mol_type = other DNA
ggtagccctagagta

SEQ ID NO: 2010 - DNA, 15 bp, synthetic construct
  misc_feature 1..15: note = Description of sequence: SARS-CoV-2 Beta S HP
  source 1..15: mol_type = other DNA
attcgccttacgcaa

SEQ ID NO: 2011 - DNA, 15 bp, synthetic construct
  misc_feature 1..15: note = Description of sequence: SARS-CoV S-2P
  source 1..15: mol_type = other DNA
gacctcattgtgaat

SEQ ID NO: 2012 - DNA, 15 bp, synthetic construct
  misc_feature 1..15: note = Description of sequence: LYRa11 S-2P
  source 1..15: mol_type = other DNA
agactaatagctgac

SEQ ID NO: 2013 - DNA, 15 bp, synthetic construct
  misc_feature 1..15: note = Description of sequence: RaTG13 S-2P
  source 1..15: mol_type = other DNA
tgtgtattcccttgt

SEQ ID NO: 2014 - DNA, 15 bp, synthetic construct
  misc_feature 1..15: note = Description of sequence: Civet-007-2004 S-2P
  source 1..15: mol_type = other DNA
gacaagtgatctgca

SEQ ID NO: 2015 - DNA, 15 bp, synthetic construct
  misc_feature 1..15: note = Description of sequence: MERS S-2P
  source 1..15: mol_type = other DNA
aaccttccgtctaag

SEQ ID NO: 2016 - DNA, 15 bp, synthetic construct
  misc_feature 1..15: note = Description of sequence: HCoV-OC43 S-2P
  source 1..15: mol_type = other DNA
taactcagggcctat

SEQ ID NO: 2017 - DNA, 15 bp, synthetic construct
  misc_feature 1..15: note = Description of sequence: HCoV-HKU1-S-2P
  source 1..15: mol_type = other DNA
cagcccactgcaata

SEQ ID NO: 2018 - DNA, 15 bp, synthetic construct
  misc_feature 1..15: note = Description of sequence: HCoV-229E S
  source 1..15: mol_type = other DNA
tacgcctataacttg

SEQ ID NO: 2019 - DNA, 15 bp, synthetic construct
  misc_feature 1..15: note = Description of sequence: BG505 gp140 SOSIP N332T
  source 1..15: mol_type = other DNA
aacccaccgttgtta

SEQ ID NO: 2020 - DNA, 15 bp, synthetic construct
  misc_feature 1..15: note = Description of sequence: HA NC99
  source 1..15: mol_type = other DNA
gctcctttacacgta

SEQ ID NO: 2021 - DNA, 49 bp, synthetic construct
  misc_feature 1..49: note = Description of sequence: SARS-CoV-2 S HP
  source 1..49: mol_type = other DNA
ccttggcacccgagaattccaacaatttgtctgcgacccatataagaaa

SEQ ID NO: 2022 - DNA, 49 bp, synthetic construct
  misc_feature 1..49: note = Description of sequence: SARS-CoV-2 Alpha S HP
  source 1..49: mol_type = other DNA
ccttggcacccgagaattccaggtagccctagagtacccatataagaaa

SEQ ID NO: 2023 - DNA, 49 bp, synthetic construct
  misc_feature 1..49: note = Description of sequence: SARS-CoV-2 Beta S HP
  source 1..49: mol_type = other DNA
ccttggcacccgagaattccaattcgccttacgcaacccatataagaaa

SEQ ID NO: 2024 - DNA, 49 bp, synthetic construct
  misc_feature 1..49: note = Description of sequence: SARS-CoV S-2P
  source 1..49: mol_type = other DNA
ccttggcacccgagaattccagacctcattgtgaatcccatataagaaa

SEQ ID NO: 2025 - DNA, 49 bp, synthetic construct
  misc_feature 1..49: note = Description of sequence: LYRa11 S-2P
  source 1..49: mol_type = other DNA
ccttggcacccgagaattccaagactaatagctgaccccatataagaaa

SEQ ID NO: 2026 - DNA, 49 bp, synthetic construct
  misc_feature 1..49: note = Description of sequence: RaTG13 S-2P
  source 1..49: mol_type = other DNA
ccttggcacccgagaattccatgtgtattcccttgtcccatataagaaa

SEQ ID NO: 2027 - DNA, 49 bp, synthetic construct
  misc_feature 1..49: note = Description of sequence: Civet-007-2004 S-2P
  source 1..49: mol_type = other DNA
ccttggcacccgagaattccagacaagtgatctgcacccatataagaaa

SEQ ID NO: 2028 - DNA, 49 bp, synthetic construct
  misc_feature 1..49: note = Description of sequence: MERS S-2P
  source 1..49: mol_type = other DNA
ccttggcacccgagaattccaaaccttccgtctaagcccatataagaaa

SEQ ID NO: 2029 - DNA, 49 bp, synthetic construct
  misc_feature 1..49: note = Description of sequence: HCoV-OC43 S-2P
  source 1..49: mol_type = other DNA
ccttggcacccgagaattccataactcagggcctatcccatataagaaa

SEQ ID NO: 2030 - DNA, 49 bp, synthetic construct
  misc_feature 1..49: note = Description of sequence: HCoV-HKU1-S-2P
  source 1..49: mol_type = other DNA
ccttggcacccgagaattccacagcccactgcaatacccatataagaaa

SEQ ID NO: 2031 - DNA, 49 bp, synthetic construct
  misc_feature 1..49: note = Description of sequence: HCoV-229E S
  source 1..49: mol_type = other DNA
ccttggcacccgagaattccatacgcctataacttgcccatataagaaa

SEQ ID NO: 2032 - DNA, 49 bp, synthetic construct
  misc_feature 1..49: note = Description of sequence: BG505 gp140 SOSIP N332T
  source 1..49: mol_type = other DNA
ccttggcacccgagaattccaaacccaccgttgttacccatataagaaa

SEQ ID NO: 2033 - DNA, 49 bp, synthetic construct
  misc_feature 1..49: note = Description of sequence: HA NC99
  source 1..49: mol_type = other DNA
ccttggcacccgagaattccagctcctttacacgtacccatataagaaa